United States Patent Application Publication US 2018/0265913 A1 - sequence listing, part 4

SEQ ID NO: 1 - DNA, 6725183 bp, Pseudomonas aeruginosa SCV20265 (residues 5,043,889-6,725,183 of 6,725,183)
cccgcgccatcgaccatgaaatgaagcgtctggggatcgactgtgtctacctggacatcagccacaagccggccgagttcatcaaggcgcacttccccaccgtctacgagcgctgcctggacttcggcatcgacattacccagcaaccgatcccggtagtgccggccgctcactatacctgcggcggcgtgctcgtcgaccagcacgggcataccgacgtgccgggcctctacgccatcggcgaaaccaccttcaccggcctgcacggcgccaaccgcatggccagcaattcgctgctggaatgcttcgtctatgcccgttctgccgccgccgacatgctccagcgcctgcccggcacgcccgtgccggaaagcctgccgagctgggacgccagccaggtcaccgactccgacgaggacgtgatcatcgcgcacaactgggacgaactgcggcgtttcatgtgggactacgtcggtatcgtgcgcaccaacaagcgcctgcagcgcgcccagcaccgggtacgcctgctgctcagcgagatcgacgagttctacagcaactacaaggtcagccgcgacctgatcgagttgcgcaacctggcactggtcgccgaactgatcatccgctcggccatgcagcgccgcgaaagccggggcctgcactacacgctggattatccggacctgctgcccgaagcccgcgacactatcctggtgccgcccatctacggcgactgaagcgcaggcggacacgcaggcgccgatggctgtcggcgcccaatgcatcggccgggatacagcagccgaggatgcgccagcggcccggcaggcgcacgcgcagtacgatcagccagggcaacgccaggctgtcagggcgcaattgcaccgcttgccagccgcttccggcgctccacagctgccagccccgctcgtcatggcgcaagccgcggaaggcccgcgagccgcgcagcagtacctggcggtacagcccccaggcaccgtaggccaggcagaccagcgcaagcggcggcttcagccagaccggcagcgccgccagcaggatcgacagcagcgccagggcccacagtgccaggctcgccgccagcaggatcggagagacccgccagcggcattcgaacggctcaatccggctggacacggtccaggatcatccgcaccatccgccgcaggtcggcgtcttccggctcgccgcgctgcatgaaccaaccgaacatgtcctggtcctcgcactccagcagcttgcggaagcgcgcctggtcctcggcgtccaggcccgggtaaacctcctgcacgaaaggcaccagcagcacatccagttccagcatgccgcgacggctgtgccagtagagtcgtttcagttcggtttcatctgccatgttcgggctcctcgaaaacgcccggcattatagggcggttgcgctcgaatggcgcggcccgatgacgaggcgtcgctccgccggcgtccgcccttggtcgtattgcccggcaaaccaagggtatccgcgcgggacgcaggcccatgccgacggcggcctcggaagtgtccgacaaccgccaaggcggatgcgccaggcattcttgcccgctgacaagcctcggaccgagttctatgatgacggtcctgactgactgaccgcgcagcatcgcaatggccgaccccgctttccacaccccgctagtccatgaaggcatcctcgccgtccgcggccctgacgccgccaagttcctccagggccagctgacctgcaacctcgcctacctcaacgacgagacctccagcctcggcggccgctgcaacatcaagggccgcctgctatcgagcttccgcatcctgcccgagggcgacggcctgctgctggcgatggccggcgagctgctcgaggcccagttggcggacctgaagaaatacgccgtattctccaaggccagccttgccgacgagagcgcagcctggctccgcataggcttgcgcgacgccagcgaggcactgcgcgccctggggatagacaccccggcggagagcggcaggatcgcccgccacggcgacctgctcgccgtcgccctgggcgacggccgcgtcgagctatgggttccggcgcagcgcgccgaggcggtgcttgccacgctccgcgagcacagccgcgaggcgccgctcgacgattggctgctcggccaggtgcgcgcaggcatcggccaggtgttcggcgctacccgcgagctgttcatcccacagatgatcaacctgcaggcggtcggcggggtcagcttcaagaagggctgctataccggccaggaaatcgtcgcccgcatgcagtatctcggccgcctcaagcgccgcctgtatcgcctggcgctggacgcagacgaggtgccggcgcccggcaccgggctgttctcgccagtccattccaccagcgtcggcgaagtggtactggccgcccgtacgccggagaacagcgtggaattgctcgccgtgctgcaggacgacgccgtcgccgacggccggatcagcctcggaagcgccgaaggagcgccgctcgtcctcctcaatctgccttacacgctggacagcgaccgcgaaatccagcgctgaccgtaaactgtgcctcgccgtccgcggacggcccgccagtattcccatggccggtgcacgtagagcgtgctccggccattgcgttttcaaaggaaatgccatgagcaagcttgccgacaaagtccaacaggacctgatccgcgccatcgatcaggatgaactggtgctgccgaccctgcccgaggtggccctgcaggtccgtgaggcggcggaagacccggatgtcagcatccaggccctgagcaaggtgatcggcaacgacgcggcgctgaccgcgcgcatcatccgcgtggtgaacagtccgctgctgcgcagcccgaaggaaatcaccgacctgcagatggcgatcagccggctgggcatcaactacacctgcaacctggccaccggcctggccatggagcagatgttccaggccaccaccgacgtggtcgaccgcaagatgcgcgaagtctggaacaagagcaccgagatcgccggcatctgccacgtgctggcccgtcactacacccgtctggcgccggaccaggcgaccctggccgggctggtgcaccagatcggcgtgctgccgatcctcacctacgccgaggatcacaacgagctgctgtcggactccatcagcctgagccatgtgatcgagcgcatccatccgctgatcggcgagcgcatcctcaaggcctgggatttccccgcgccgatcgccgaggtcccgcgccagcacctggacttcacccgcaactcgccgcgcgcggactataccgacctggtccaggtcgccaccctgcagagctaccttggcagcgagcatccctatacccgcctggactggagccagatcccggcgttcgccaagctcggcctcgagccgaccgtcgacatgaaggaagacgaggacctctccagcgccctggaagccgccaccagcatgctgcaatagaccccgccctactccgccgggaagcgcacccgcaccagcaagccgcccagttcgccctggtcgagctggatctgcgcccggtgcgcccggcagacctcgccgacgatcgccagccccaggccgctgccggggctgtcgccgcgccggtagaagcgctggaagacccgctcgcggtcggcggcgggaattcccggaccatcgtcttccacttccagcacgcccccctgcagcaccctgaggatcacgttgccgccctgcggggtgtgcgccagcgcgttgtccagcaggttgctgagcaattcgttgagcagcgtcggttcaccctggatccacaccggcccggcgctttccagcgccagcgaggctccccgcgcataggccagcggcgccagcgccaggcccagttcccgggccagggcggtcaggtcgatacgctcggcgccgccctcggcgatggcctgggcgccgctttcgatgcgcgccagggagagcagctggttggccaggtggatcaggcggtcggtgttcttcgccgtggtctccagggtcgaacgccaggcttccggctcctgctcgcgcaggcccagttccaggcgcgccttgagcgccgccagcggcgtgcgcaactcgtgggcggcatcggcgatgaactgcgactgccgctcgaacaggctgcgcaggcgctgggtgaagtggttcagcgactccaccagcggccgcaattcatgctggacctctagcatcggcaacggccgcaggtcgtccggctggcgctcttccacctcgcggcgcaggcgatccagcggacgcagcgcggcgctcactgccagccacaccagcaccagcgcgccgacgccgaggacgcccaggcgcagcagggtatcggtcatcaggctgcgcgccatgcgctcgcgggcgccttcggtctccgccacgcggatctccgccatgccgctcatgctcggttcgctgaccggttgcagcaggctcaccacgcgtacgtcgacgccctggtagacgccgtcgtagaacttggccagggccgggtagtcgtcggtgcgcagggcatcggcgggtgccgccggaagattctcgtagccggagatcatccgtccgtggatgtcgttgacctggtagaagatccgcccggcgctgtcgtaggcgaaggtatccagtgccacgtaggggacgtcggcgcgcagggtgccgtccttctcgtagagcccgtcggcgatcgcccgcgccgaggccagcaaggtccggtcgtaggcggtgtcggccacctcgcgaccgttccagtaggcgctcaggccgctcgccaggagcaccagcagcaggagcagggccagccacagcagcagccttccgcgcaggctgccggcatcagtcaccctgcgcctccagcaggtagccgaggccgcggaaggtgacgatgcgcacggcgccgccttccagcttcttgcgcaggcggtggacgtagatctcgatggcgtcggcgctggcctcctcgtccaggccgaagacctgggcggccagttgctccttgctcatcacccgccccggacgggcgatcatcgcttccagcaccgcctgttcccgcgaggtcagggtcagcggctgctcgtcgaggctgaagcgccgggtgccgaggtcgtagaccagggcgccgcagcgctgcaactgttcgccaccgagcacgctgcggcgcagcagggccttgacccgcgcctccagctcggacagttcgaaaggctttgccaggtagtcgtcggcgccgagattgaggccgtgcacccggtccttcacctcgccgcgcgcagtcagcatcagcaccggcagggtcttgccgcgcccgcgcaggcgcgccagcacctcgaagccgtccatccgcggcaggccgacgtcgaggatcgccagggcgtactcctcgctggccagggccaggtcggcggccaccccgtcctgcagcaggtctaccgtccagccggcgcccttgagcgcctggaccacgctttcggcgagctgcggatgatcttccaccagaaggatgcgcatggacggttctccaccaccggatgagggcacaagaggcgaagtgtaccggggaaaaccctccggtaaatggcttctctgccaccggggattgctgaaagcctggcgaaagcttggcgccttaggatcagtcgatggacggcgcagatcgtccgccaaaacgccttgcagcgtggtgctcggcgtacaagaacaagaatcggagaccactgcatgtcgacttccctgccgcaggccgcaaggtctgtacgttcgtcccgcagcaccaccctgaccaccaccgccgtcgtgctcgccggcatcgcgcccctgggcaacgccgccggcttcctcgaagacagcaaggccagcctggaaacccgcaacttctacatgaaccgcgacttccgcgacggccccggccagtccaagcgcgaggagtgggcgcaaggcttcatcctcaacctgcagtccggctacacccagggcaccgtcggcttcggcctcgacgccatgggcatgctcggcgtcaagctcgactccggccgcggccgcagcggtaccggactgctgccgaaggattccgacggccgcgcaccggacacctactcgaaactgggcctgaccgccaaggtcaaggtctcgcagagcgagctgaaggtcggcacgctgattccgaagttgccatcggtacaaccgaacaacgggcggatcttcccgcagatattcgaaggcgcgctgctcacctcgaaggagatcaaggacctcggcttcaccgccgggcgcctggaaaagaccaagatccgcgactccagcgactccgaggacctcgcgctgaacgacaagaacggccgcttcgccggggtcagcgccgatcacttcgacctcggcggactggactacaagctcaccgaccaactcaccgccagctatcactacagcaacctgcaggacgtctaccgccagcacttcgtcggcctgctgcacagctggccgatcggtcccggcgaactgaccagcgacctgcgcttcgcccgcagcaccgacagcggctcggccaaggccggcggcatcgacaacaagtcgctcaacggcatgttcacctacagccttggcaaccatgccttcggcgcggcctggcagcgaatgaacggcgacgacgccttcccctacctggaaggcagcaacccgtacctggtcaacttcgtccaggtcaacgacttcgccggccccaaggagcgctcctggcaactgcgctacgactacgacttcgtcggcctcggcattcccggcctgaccttcatgacccgctacgtcaagggcgacaatgtcgaactcgccgggcagcgcggcgaaggccgcgaatgggaacgcaacaccgaactgcagtacgtgttccagagcggcgcgctgaagaacctcggaatccgctggcgcaacgcgaccttccgttccaatttcacccgcgacatcgatgagaaccgcctgatcgtcagctataccctgccgatctggtaagccagaacaagaactccacaggagcaccgatgatgatgaaactgtcttttcgtcccctcgccttggttgccgccggcctgctgctggccggcgccgccgtggccgaacccaagcgtcccgaatgcatcgccccggcgtcccccggcggcggtttcgacctcacctgcaagctggcccagagcgccctggtcgaggccaagctgctgagcaagccgatgcgcgtcacctacatgcccggcggcgtcggcgcggtcgcctataacgcggtggtcgcccaacgcccgggcgacgccggcaccatcaccgccttctccagcggctcgctgctgaacctggcccagggcaagttcggccgcttcgacgagaacgcggtgaaatggctggccgccatcggcaccagctacggcgccatcgcagtgcgcaccgactcgccctacaagaacctcgacgacctggtgaaggcgctcaaggccgacccgagcaaggtggtgatcggctccggcggcaccgtcggcagccaggactggatgcagaccgcgctgatcgccaaggccgccgggatcaatccgcgcgacctgcgctacgtggccctggaaggcggcggcgagatcgccaccgcgctgctcggcgggcacatccaggtcggcagcaccgacatttccgactccatgccgcacatcctcagcggcgacatgcgcctgctcgcggtgttctccgaagaacgcctgccagaggcggcgatggccaacatccccaccgccaaggaacagggctacgacatcgtctggccggtggttcgcgggttctacctcgggccgaaggtcagcgacgaagactacgcctggtggaagaacgccttcgaccaactgctggcctccgaggacttcgccaagctgcgcgaccagcgcgagctgttccccttcgccatgaccggcgaggaactcgacggctacgtgaagcagcaggtccagcagtacaagcaactggccaaggacttcggcctgatccagtaagccagcccgcgcgcggccggaccccggccgcgccacgaggatcgtcccatgacccgttccaacctgtaccagcgcctgttcgccgggctctggctgctcgcctgcgtcggcctggcggtcgccggctggcgttaccaggcgccgttttcctacgaaccggtcggcccgcgcgcctacccgctgctctgcctggcgctgatgggcgccggcctggcgtggctgatcgcgcggccgacgccgatccgccacgccgaggacgaacaaccgctgggcggcgccgtgctgctcaaggtgctcgcctgcatcgccctgctgctggtgttcgccggcctgttcgaaacgctcggcttcatcctcagcgccgccctggtcggctcctgcatggccattctctacggcgcccggccaatccctgcggtggtcaccgcgagcctgctcgggatcggcctctactggctgttcgaccgcgccctggacgtcccgctgccgctgggcgttctcgacttcctgccgctgtgaggacttcgtgatggaaaccttgaactacctcggccagggcttcggcgtcgcgatgacgccgaccaacctgatcaccgcgctgatcggcaccctgatcggcaccatcgtaggcctgctgccaggcctcggtccgatcaacggcgtggcactgctgatcccggtggccttcgccctcggcctgccgccggaaaccgcgctgatcctgctcgccgccgtatacctgggctgcgaatacggcgggcggatcagctcgatcctgctcaacatccccggcgaagcctcgaccgtgatgaccaccctcgacggctacccgatggcacgcaagggcctggccggcgtggccctgtcgctgtcggcctggagttcgttcattggcgctttcatcgccacctgcgggatggtcctgttcgccccgctgctggccaagtgggcgatcgccttcggtccggcggaatatttcgtgctgatggtgttcgccatcgtctgcctcggcgggatggccggcgaccgcccgctgaagaccctgctggcggcgctgctcgggctgttcctgtcgagcgtcgggatcgacgccaacagcggcgtgtaccgcttcaccggggacagcatccacctcgccgacggcatccagttcgtggtcctggtgctgggcctgttctcggtcagcgagatcctcctgctgctggagaagacccaccacggccaggaggcggtgaaagccaccggacgcatgctgttcaacttcaaggaggccgccagcgtattcctggtcaacctgcgctgcggtctgctcggtttcgtcatgggcgtactgcccggcgccggcgcgaccctggcaagcgcggtggcctatatgaccgagaagaagctggccggtgccaagggcgagttcggcaagggcgacatgcgcggcctggccgctcccgagaccgccatcggcgcctccgcctgcggcgccatggtgccgatgctgaccctcggcgtgcccggctcgggtaccactgcggtgatgatcggcgccctgaccctgtacaacatcactcccggcccgctgctgttccagcagcaaccggacatcgtctggggcctgatcgcctcgctgttcatcgccaacgtcatgctgatcatcctcaacgtgccgatggtccgcgtattcacccgcatcctcgcggtgccgaactgggccctggtgccggccatcgcgatcatcaccgggatcggcgtgtacggcgtgcatgcgaccaccttcgacctgttcctgatggtcggcatcggcgtgatcggctatatcctgcgcaagctcgacttcccgctctcgccgctgctgctgggcttcatcctcggtggactgatggagcagaacctgcgccgcgcgctgtcgatctccaacggtgaactgggcatcctctggtcgagcccgatcagcctggtgacctgggcgctggtggtggtaatgctgctgttgccgctggtccgcgcctggcgccgccgcgtggcccgtcgcgcgacagggctggccgatgcctgagcgcgtcacctggaggctgtactgggcgacgccgctggtgggcgcccttggcggctggctggcaagcctggtcggctggccgctgccgtggatgatcggctcgctgcttgcggtgatgctggtgcgttgcctggccgacctgccgctggccgaagtgccggggacacgcaagtgcgggcaatggatcgtcggcatcggcatcggcctgcacttcaccccggcagtgatcgagcaagtgctggcgcatagcgtgatcatcgtcttcggcgccgtggccaccacgctttccagcgtgctggcgatcgccttcatgcgccgcagcggcgaggaccgcgccaccgcgttcttcgccagcatgcccggtggtgccagcgagatggtcaacctcgggcagcgccacggcgcggtgctcagccgcgtcgccgcagcgcagagcctgcgcctgttgctggtagtgctgctggtgccggcggcgttccagtacctgctcggcggcggccagccaggcccgcaccaggccgcgccggtggactggcactggctggccctgctgttcccggccggggcgctggtcgcgctgggctggcagaagttgcgccaacccaatccctggctgctcggcccgctgttgctggcggccggcgtcagcctcggcttcgacctgcatatcggcctgccggccggttccagcggcgtcggccaatggctgatcggcagcgccctgggttgccatttcaaccgcagtttcttccgcagcgctccagccttcgtcagtcgtaccctggtctgcacgctgtggatgatgttcgccgcggcgctcgccgccgagttgctcggctggctgaccaccctcgaccaccagtcgctgatgctcggcatgatgcccggcggcatcgccgagctgagcctgaccgccgaagccttgcagctctcggtgccgctggtcaccgccttgcaggtactgaggctattgctggtgctgttcctcgccgagccgtgcttccgctactggaggaagcgcgccggctgatcgagccacgccgccacactggatgtgtggcgttttccagcccgcctcgtgcgggcttttttttccgggcgcggtcagaggcacacagcggcacccaccatgtgaagagctgggcgacagcggccttcagaggtccggcagcgaccagtcgataggcgtcttgccgttctgctcgaggaacttgttggtgcggctgaagtggccgttgccgaggaaaccgcggtaggccgacaacggcgacgggtgcgccgacttgagaatcaggtggcgctgcgggtcgatcagcttctgcttgctctgcgcgtggctgccccagagcaggaacaccaggcgctcgcaacgctcgttgaccacctcgatgacgcggtcggtgaacggctgccagccggcattggcgtgggagccggccttggcctgctcgacggtcagggaggtattgagcaacagcacgccctgctccgcccagcgctgcaggtagccgttgttgggaatcgggatgttcaggtcgcggttgagttccttgtagatgttctgcaaggacggcggcgtcggcacgccgggctgcaccgagaagcacaggccgtgggcctggcctggtccgtggtagggatcctggccgatgatcaccaccttgacgttctccagcggcgtggtgttcagcgcgttgaagatcaatggcccgggcggaaagatcaccttgccggcggccttctcctggcgcaggaactcgcccagttgcttcatgtagggcttgtcgaattcctcgcgcagcgcttccttccaactcgcctcgagcttgatgcggtcgtcgttatcggtcatggaaccccctgtctcggtactgaaaaagtcgtccggcctttttcagaaggtcgccgacagcctgtggccgcggaaccgtagaaaagcccgccgcgcttgtcaatctcgggacaggcgggcctcttccaccggatacttcacgcgcacccggttgcggtacaggcactcgctggccagcagggtgccggcctggcccttttcccggatgtcgcgccagatctcgttgagcctcagcaccgcatcgccgtcgcggacaaagcgctgggccctctcatagacgtggtagcgcacagggcgcggcgcgctgcacagcagttcgccttccagttggtgggcggcgatatggaagcgcagctggaaggtatccgccgtcggattgtgcagcaccaggtcgatgaagttgtagaagatcgccgcgcccgagccgaacggcaggatccgtccctcgtcgggaaacgggtcgaagctgtggttggcccgctccaccacgcgcagcggggaatgcagggccatccagtggatcaggttgctcagttggcagatgccgccgccgattccgctgcgcgcctcgccgaaggacaactccataccttcgacgaagccacgccgggcgctgggccgaccgaccagccggcagaacgagaagtactcgccggggccgatgctcacgccgttcatgcagtccaccgccaggcgcaggttgaccaccttgttgcgttgcagggcgaggtcgctgtcgccgaggcggcggatcaacttcgaggtgtgcttgatgtagcggtacggcaggcgctcgtcgatcgatggcaaccgcacgtagcgacggccgccaagacgccagcggcagtgccgccagagacgtcgttgccagacccgcagccagtagagccaggggtggtagagcgataggggtttgcgcatcgacgatccttgtcggtctcggcccacgggcaggatgcagcattatgcccggagcactagccctggtgcagcgcccggtagtgactgggcgccatgcccaccaccttgcggaacagccgcgagaagtaatagggatcggcgtagccgagctgctcggcgatctgccgcacctccagcgcgccctcgtcgagcaggcggcaggcacgggccatcttcatctggatgaaatcctggatcggcgcctggccggtcagggcgcgataggtcttggcgaaatggaagcgcgacagcttgaactgcgccgccagctcgtcgaggttgaggctgtcgtgcaggtgcgcgcgcatcagcgcctgcaccgcgtcgatgtccagcacccgtccggatttcaggctggcccgcgccggacgcaccgccagcgaggtgagcaggccctgcaacaggtgcgcggcatggatgaagtgcggcaggctgaggccctggcgacgcagcgccagcagcgcatcgaactccgccagcaggcgcggctgcatgcccaggcgcaggcgcggggcgctgcccagcggacgcaggaaatcctccgccagtccgccttcgaaatgtacccagtagatgctccagggccgctgcgagtcggcgccgtaggcatgttcccggcccttgggcaggaccagcaggtcgccgccgccgacctcgacgcgctcgccggcacactccagccagccgcgtccggcccggcagtagatcaacaggttgtcgtccggcgcgcgccgctgcatgtggtggccatgcgcctccggatagtaaccgagggccagcgggtagcaggcctggccgagcggatggcgggccagggcgcgacgcaggcggggcggcgtgatgaaacgcacaccctggttgggcaggggccaggcggaggtctgtacggaacgcttcacggcgacgcgactcagtagtctgaatcccaagatcgtccatcccttgcgcaagatcgtcaatccacaggcggcttgcggccggctataacgactcaaaacaacatcccggtccaccgggaagcggaggcgacgatggccaaggcaatcccccagctgatcgacggcgaatggcgcggcagccgttcccgcgagctggtcgaagtcaccgatccggcgacccaggacgtcctcgcgctggcgccgaaggccaccgccgacgagatcgagcaggccatcgccagcgcccagcgcgccttcgagacctggcgcgaagtcccggctcccgagcgagcgcggttgatgctgcgctaccagcacctgctcaaggaacaccacgacgaactcggcgaactgctggcccgggagaccggcaagaacctcgccgatgccaagggcgacgtgtggcgcggcatcgaggtggtcgaacacgccgccaacgtggccagcctgatgatgggcgagacggtggaaaacgtcgcccgcgagatcgacaccaccagttggatccagcccctcggcgtgtgcgccgggatcaccccgttcaattttccggcgatgatcccgctgtggatgttcccgctggccatcgcctgcggcaacaccttcgtcctcaagccctccgaacaggatccgctgacacccaaccgcctcgccgagctgttcctcgaggccggcgcgccgaagggcgtgctgcaggtgatccatggcggccgcgagcaggtcgatgccctcctcacccacccggacatccgggcgatttccttcgtcggctcggtcgccgtcggccagcacgtgtaccgcaccggcaccgcgcacctgaagcgggtgcaggccttcgccggggcgaagaaccacatggtgatcctccccgacgcgaacaaggcccaggttctcggcaacctggtcggcgccagttgcggcgccgccggccagcgctgcatggcgatcagcgcggcggtgttcgtcggcgcggcgcgcgagtggattcccgaactggccgagcggatggccgccctgcgccccggccactggcaggacccggacgccgcctatggtccgctgatcagcccgcaggcgcgccagcgcgtgctgcgcctgatcgccgaaggcaaggcggaaggcgccgagtgcctgctcgacggctcgcagtgccaggtcgaaggctatcccaacggcaactggctcggtcccaccctgttccgcgcagtgacgccgaagatgggcctgtaccgcgaggaaatcttcggcccggtgctggcctgcctggaggtggaaagcctggaagaggccatcgccctggtcaacgccaacccctatggcaatggaacaagcctcttcacccgctccggcggcgccgctcggcgctaccagcacgcggtgcaggtcggccaggtgggtatcaacgtaccgatcccggtaccgctgccgttcttctccttcaccggctggaagggttccttctacggcgacctgcacgcctacggcaagcaggcggtgcgcttctataccgagaccaagaccgtcaccagccgctggttcgacgatgaaccgacgaccgacgaatcgtcggccggcccgaacatgaccatccatctcaagtgacccgaggacctatggatttcgacctcaccgaagaacaacgcctgctggtggagagcgcccgcgccttcgcccgccacgaactggcgccgaaggcggccgactgggaccgcgaccatcacttcccggtggaagtcatccgcgccgccgccgaacagggctacctcggcctgtacatcgccgaggaagacggcggcctgggcctgtcgcggctgtccacttcgctgatcttcgagcaactggccgccggctgcgtggccactaccgcctacatcagcatccacaacatggccgcctggatgctcgcctcgttcggcgacgcggcgctgaaggaggcctggctgcccggcctgatcggcggcgagtcgctcgcctcctattgcctgaccgagcccgatgccggctccgacgccgcgcgcctgcgcacccgcgcccgccgcgagggcgacgaatacgtgctggacggcagcaagtgcttcatttccggtgccggcagcacccaggtgctgatcgtcatggcgcgcaccggcgaggacggcgccaggggcatctcctgcttcctggtgccggccgacgcgcccggcatccgctacggccgcaacgaggacaagatgggctggcgcgcgcagccgacccgcaccatcaccttcgaaggcgtgcgcatccccgccggcaaccgcatcggcccggagggccagggcttcgtctatgccatgaaaggcctcgacggcggccgcctgaacatcgccagttgttccctgggcgccgcccaggcggcgctggagcagtcgatgcgctacgtcgaggagcgcgagcagttcggcaagccgctggcgaccttccaggccttgcagttcaagctcgccgacatgctcaccgaactcaccgccagccgccagatggtccgcctcggcgcccatcggctggaccgcggcgacgccgaggcgaccctgtactgcgcaatggccaagcgcttcgccaccgaccgctgcttcgatgtctgcaacgaggccttgcaactgcacggcggctacggctatctcaacgattatccgctggagcgctgggtacgcgacacccgcgtgcaccagatcctcgaaggcaccaacgaaatcatgcgggtgatcgtcgcccgccgcctgctggagcagggcggcatgctcgatcgcctgctgtgaacgccgcgaaccatcgcatccgatagtgccgggacgccccggcccatgatccagtgagggacttcatgaacactgccgtcgaaccctacaaggcttcctccttcgacctgacccacaagctcaccgtggaaaagcacgggcacaccgcgctgatcaccatcaaccacccgccggccaacacctgggaccgcgactcgctgatcggcctgcgccaactgatcgagcacctcaaccgcgacgacgatatctacgccctggtagtgaccggccaggggccgaagttcttctccgccggcgccgacctgaacatgttcgccgacggcgacaaggcccgcgctcgcgagatggcccgccgcttcggcgaagccttcgaggcgctgcgcgatttccgcggggtgtcgatcgcggcgatcaacggctacgccatgggcggcgggctggagtgcgccctcgcctgcgacatccgcatcgccgagcgccaggcgcagatggccctgccggaggccgcggtgggcctgctgccctgcgccggcgggacccaggcgctgccctggctggtgggcgaaggctgggccaagcggatgatcctctgcaacgagcgggtggatgcggaaaccgccctgcgcatcggcctggtcgaacaggtggtggacagcggcgaggcgcgcggcgccgccctgctgctggcggccaaggtggcacgccagagcccggtggcgatccgcaccatcaagccgctgatccagggtgcccgcgaacgcgcgccgaacacctggctgccggaggagcgcgagcgcttcgtcgatctgttcgacgcccaggacacccgcgaaggggtcaacgccttcctcgagaagcgcgatcccaagtggcgcaactgctgagccttcccatcgaacccggcgggctgcgccacagcccgcccgagccgagagccccgacatgaacgtgcttttcgaagaacgcccgagcctgcatggcttccgcatcggcattgccaccctggatgcggaaaagagcctgaacgccctgtccctgccgatgatcgaggccctggcggcgaaactcgacgcctgggccgaggacgccggcatcgcctgcgtgctgttgcgcggcaacggcgccaaggccttttgcgccggcggcgacgtgcgcaagctggtggacgcctgccgcgagcaacccggcgaggtaccggccctggcgcgacgcttcttcgccgatgaataccgcctcgactaccgcatccatacctacccgaaacccttcatctgctgggcccacggctatgtgatgggtggcggcatggggctgatgcagggtgccgggattcgcatcgtcaccccgtccagccgcctggcgatgccggagatcggcatcggcctgtacccagacgtcggcgccagctggttcctcgcccgcctgcccggcaggctcggcctgttcctcggcctgagcgcggcgcagatgaacgcccgcgacgctctcgacctcgacctggccgaccgcttccttctcgacgaccagcaggacgccctgctcgccggcctggtgcagatgaactggaacgagtcgccccaagtgcaacttcacagcctgcttcgcgccctcgaacacgaggcccgcggcgaactgccggaggcccagttgctcccgcgccggccgcgcctggacgcactgctcgaccagccggacctggcgagcgcctggcaggcgctggtggcgctgcgcgacgacgccgacccgctgcttgcgcgtggcgcgaagaccctggccgagggctgcccgatgaccgcgcatctggtctggcagcagatcgagcgtgcgcgctacctgtcgctggccgaggtgttccgcctggaatacgccatgagcctgaactgcacgcgccatccggacttcgccgagggggtacgcgcaaggctgatcgatcgcgacaacgcaccgaactggcattggccgcaggtggaatcgatcccgcaggcggtgatcgaggcgcacttcgagccgacctgggagggcgagcatccgctggcggggctctgatccgccgcgccgccctctgccgaaggagggcgcgggcccgccacgtccatagcgtctaagctgtttcacagcatccccaagaggcctcgcggccgccacaggaggagctccatgaaacagatcgccttcatcggcctcggccacatgggcgcgccgatggccaccaacctgctcaaggccggctacctgctgaacgtcttcgacctggtgcagagcgccgtcgacggcctggtcgccgccggcgccagcgccgcccgcagcgcccgcgacgcggtgcagggcgccgacgtggtcatcagcatgctgccggccagccagcacgtcgaaggcctgtacctcgacgacgatggcctgctcgcgcacatcgcccccggcaccctggtgctggaatgctcgaccatcgccccgacctcggcgcgcaaggtccacgccgccgcccgcgagcgcggcctggcgatgctcgacgcgccggtgtccggcggcactgccggcgcggcagccggcaccctgaccttcatggtcggcggcgacgacgaagccctggagaaggcccggccgctgttcgaggccatgggtcgcaacatcttccatgccggccccgacggcgccggccaggtggccaaggtgtgcaacaaccagctcctcgcggtgctgatgatcggtaccgcagaagccatggccctgggcgtggccaacggcctcgacgcgaaggtgctggccgagatcatgcgccgcagctccggtggcaactgggcgctggaagtctacaacccctggccgggggttatggagaacgctccggcgtcgcgcgactacagcggcggcttcatggcccagttgatggccaaggacctcgggctggcccaggaagccgcccaggccagcgccagcagcacgccgatgggcagcctggcgctgagcctgtaccgtctgctgctgaagcagggctatgcggagcgggacttttccgtggtgcagaaattgttcgatccgacccaaggccaatagacaggcaggcgggtccgcgcccaggctggtcgattcgacgatgcgaggagcccgccttgaacgccctgctgctgcgttaccgtttccgcctgctgttcttttccaccgtgctgttcacggcgatcctcggcctgccgtcgagcaccaagccacgggtgctcggcagcctcctgctgctggtgctggccgggatgaacaccttgcgcagacgcagtccgctggtctacctgacggccttcttcggcctgttcagcctggccctgtacaccactgcggacttcagcagtccctactccagcctgccgcccggcctgctgcgcgggctgagcctgatcctgctgtacctgaccctgttcgccgcgctgttccgccgcgtcacccaggagcgcccggtgacccacgagctgctctacggactctgcgcgctctacctgcagatggcgctggccttcgctctcgcctactacatggtcgaacagatgcagccggccagcttcatcgccagccatggcgcactcggcctggataccttcgtctactacagcctggtgaccctgaccaccgtgggctacggcgacatccaggcgatcaacccgctggcgcgcctgctggccggcagcgaaggagtgatcggggtcctgttcatcgccctcgccgtggcccgcagcctgaccctgatgagcgacagcgaggaggtctgattattaagctgagctaacgagtgcatcccccgcgcagcggtttatcccggcgagcgcagggcggatgatgctgatcgacgccgctctgcggcatttctcgaacggaaggtgcagcatgaaaatcgccctgatcggcgccaccggccacgtcggccactatttcctcaacgaagccctgcaacgcggccacgcggtgaccgccctggtccgcgacccgagcaagctggcggcgcgcgacggcctctgcgtagtgcaggcggacgtcagcgacccggcccaggtggccagcgccgtggcaggccacgaagtggtcatcagcgctttcaacggcggctggggtagcgccgacctccgcgcccgccacgccgccggcagccaggccattctcgacggcgtgaaacgctccggcgtgccgcgcctgctggttctcggcggcgccgggagcctggagatcgcccccggccagcgcctggtggacagcccggaattccccgagcagtggaagcagggcgccctcggcgccgccgacgccctcgaccaactgcgcggcgagcaacgactggactgggtgttcctcagcccggcgatgctcctcgaacccggccagcgcagcggcaagttccgcctcggcggcgaccaggtcctgtttgacgccaagggcgagagccggatttccctggaagacctggcggtagccatgctcgacgaggccgagcagccccgtcatcatcgccagcgcttcaccgtggcctactgaaaagaccaggcgcccctctcgggcgccttcgtcgtcagccttcggacttcgccgccggcgtgacgatatcgaaccagaagtcgaagtcgccgagcatgccgaacagttgccccagcaacagcggattgccggaactcttcagcttgccctcgaagaccaggcgtaccgccgatacctctttgagcagcagccggttgagatcggcgcggtcgatgctcacggtctgcccggcgtcctcgctctgcacgccgcgcaggttgttcaggtgcgagttcttcagttccagcaggtagttctcaccgatgtccggcaggcgcaggttgatgctcagcgccttgccctccgcagcgccggcgtccaggcgcacgccgagatagtcgaacagcaggccggtgtccatcgccgccagggcatcggcgctgccggccttcatcgtcggctggtcgcgcggtacgccgtggcgcagttcgtaggcggcgctgaggtagctgttgcgccagccggcgttctccgcctggtagccgagttgctccagggcgtcggcctgcagctcgcgcgcggcccggttatccggctcggcgaagaccagcctgttgaccacctcgaccacccaacggtattcgcccctggcgtacgacgcccgcgcttgctccaacaggcgctcggcgccgcccatgtattccacgtagcggcccgccgagtcctccgggctgagcgggtcgagggtcgccgggttgccgtcgtagtagcccaggtagcggttcagcacggcccgtgcgttatggctgaccgagccgtggtagccgcggtcgtaccattcctggtcgaggctgggcggcaggcgcaggcggttgtgcacctggccgatggtcacgccctggttggccaggtgcagggtctggtcgtgcaggtagccgtacaggtcgcgctgcttctccagcacctcgacgatctccgcgttgccccagcgcggccagttgtgcaccgcgaacatcacctcggcctgcctgccgaaacgatgcagcgcctggttgatgtacttgctccagcccagcgcatcacgtacctcggcgccgcgcagggtgtacaggttgtgcagggtaccgaccacgttctcggccatcagcagggccttctgccgcggcagccagatgttcatctccgccggcgactcggtgcccggcgtgttctggaaggtgaacggcacgccgtccagcaccaggtcctcgccctcgccttcgatcaggcgggtcggcgccagcaggctcagcggtccgcgcgccaatcccttgccgatggccatgtcgacctgcccctgcggccccttgggcagttgcgtgccgtactggtaggtggcgcggcgcatcatggcgttgccggccaggacgttctccttgatcgccgcctccatgaagccggccggagcgatgatctgcaccgcgccgctggcgacctgctgtggctctaccagaccgcgcacgcctccaaagtgatcggcgtgggcgtggctgtagatcaccgtacggatcggcctctcgcccagctcgcggctgaccagttcgtaggccgccctggcggtggccggggtggtcagggtgtcgaccacgatccagccgctgtcgccgcggatgaaggtgatgttggccaggtcgaagccgcgcacctggtagataccctcggcaacctcgaacaagccgtacttgagattgagcagggcctggcgttgcaggctgggattgatgctgtcgcgaggcttgccgtcgaggaggaagtcgtagccaccgagctgccaggcgacgctgccgtcggggttgcggatgagtaaccgctccgggcgccggatcaggccgcggtcggcgcgctcgaagtcggcgcggtcggcgaagggcaattccgcttcgacccgccgctgggcctcgacggtgaaggcactgggcggtttgggcgcggtggtttcggcggcgccggcgagcagcggggcgagcgccaggagtgcaagcagacggctcatcggatactccgttttattgttgtgggcttcggctggcactatgccgagcggcacggcaataattccaatgcattccaggtccacattcgatgcggagtccgcatgagcgatctacgccagttccgccacttcgtcgccctcgccgagcacggccactatgcccgcgccgccgaagcggtgaatctcagccagccggcgctgtcacgcagcatccaggcgctggagggacagttgggttgcaccctggtggagcgcggcagccgcggcgtggccctcacggcccacggccggctggtgctggaacacgctcggcgcctgctggccgggcatcgcgcactgcacaacgcggtgagccagttggccaatctcgacagcggcgagctacgcctgggcggcggtcccttccccgccgcacggctgttgcccgaggcactggccggtttctccagcgcccacccacgcgtgcgcgtcgtactgctcatcgaagactggcagaccctacgccagcgcctgctggatgacgccgtcgaactcttcgtcgccgatatccgcgagctgcaaggcgatccgcagttgcgcatccacccgctacgcgagtatcccggcgtactcttctgccgccccggccatccgttgctgcgtctggtgaggccgagcgccgagcaactggccgactacccgctggccggcccgcgcctgcccgaggcagtccgcggcgacctggcgcgcctgctgcaacgcgaagaaccgctcggcatacagtgcgacgacgtgctgatgctcaagggcctggtcggctccagcgagctgatcagcctggcgccctgggacgtggttgccgccgacgtcgaggccggccgtctggcgctgctgccctggcccgccggcgccgagcccgcccgcgccaagggctccgcctacggtctggtcagccgcgccggccgcagcctgtcgccggccgcggcagtgttcgtcgagcgggtgctggaacaggaccggcgcttcgccgccacctgaggatcagcgccagcgagcgtcgtcgcggcgctcctgccaggaacggttccagtcgcgcccgcggttgtcacggtcgcggtcgtgatagcgctcgtagcggtagtcgggacgatgccggtggtcgttgcggtcgtagaccacgcaggccgacagcggcaggacgaggatcagcagggaaagcaaacgacgcatggcgcctcctgtgcggttccggcctctcctgcggatgcgggaggattgcctgttccggaacctgcacatcggactgcgcggcgcgcgggcggtgcccgcggcgagagtaaaacctgggtaaatcagccgaggctacgcaggtgcaggacgccgaacagcagcacctggaggcgctccagccaaggtgccgggcgcgccttgagacgcccgttgagcagcaggatctcggcggcatggaccagcaccagcacgccggacaacagcaggatcggtcgatgcaactcgcccagcgggtaggccaggttgaccagcgcgacgagccagaacatcgccagggcgcccttggcgaacgacagaaaatgactcatgggaacctcctcgtttcggtatcggcagagtgtgccgagcaaatgcgccaagagggtccgcactttcgactggaaagcacgacggcgcccgcaggcgccgcctttccttgcgcacctcagttgcgccagcgaggtgtcccgccctgctggccctggtgtcccggacgatcctgccgaccgtgttgttgccagcgttgcggagaatgcccgcgccattgcggctggccgccgcgctgccagttgcccggatgccgctcgccacgatgggccgggcgcgattcgtggtagcgctgctggtagcgatattgctcgcgccggtagtcgcggtggccatcgtagcggcgtggcgccgggtagtagcgttggtcgtagtagcgcgtcgagtagtagcgccgttcgctgcgccagccatcgtcatacacgcgatagcgcggcacttcgtaggcgtagccgtagggctggccgcgatagtggcgccaatcgccgtcatcgtagtcgtagtcatacaccgcgcagccacccaggctggcgagaagcagaagaagcgggactctcaggaatgtgcgccacatggcagcctcctgcggccccgctgccgaccggccggacgaccggcgacgccgcgaggcgcgcatacgacgtgaagactcgggaaatggaagtgggctcagcaccagcctttcttggcgtggcccggaggacaatggggcgggccgccgcgatcgtagccgtagtagccatcgtcgaacggatccagttcgacgtaggcgcccggcacccgaacgctgcaaccgctcatcaggaaggccgccagtagcagcccgaacaatcgcatgaccatcagcattctccttcatcgcagaacgcagccgaaccacgcctggacaagatcccgatggagcgggaagccggttgcggcggttgcaacccggctgcaatagagaccgaaggaaaaaacggaaattccctgaatccgaccaacgacacgggcctccagaacgtgaccgcagccggcgtttctcggtagagtgcgcggaccaaggactgccggccccgccggaaccgctcaaggagcatgcatgcaacccatcgaccgcgcccaggcacagcagcgcgccaacgacatcctggtgttccagcgcgagctgcaacgcctcgaccaggagcaggcgttccgcctcgaaccggcccaggcccggcaactcgccgactatcacctggccctgctggacagctaccgcgaccgtttcgacatcgaccacgacctgcgcagccagcaactttcgctgggcatgcgggtagcctcgttcttcggcgccctggccttcgccgccagcgtgttcctgctgttctatcgcttctggggcctgttccccaccgtcgcccaggtggcgatcctgatcggcagcgccttcgccgcgttcttcgccacgctctgggtccaggccaaggacgcctcgggctacttcagcaagctggcggcgatggtcgcgttcgcctgcttcgtcctcgacctgaccatgctcgggcagatattcaacgtcacccccagcgacctggcgctggtgccctgggcgctctacgccctgctcctggcctacctgtgcaacgcccgcctgctgctggcggcggcgatcctctgcgtgatgggtttcatcgccgcgcgcgtcggcacctggggcggcggctactggctgagcgtaggcgagcgaccggagaacttcttccccgccgccgcgctgatcttcgccgtgccgctgtgcttcgatcagcgcaacttcagcggcttcgccgtgatctaccgggtgttcgccctgctcggcctgttcctgccgatgctggtgctggccaactggggctcaggcagctacctggcgttaccgtcggcgctcatcgaggggctctaccaggtcgccggcttcgtcgccgccgcccttgtgatctggctcggcgcgcgacgcaactgggcggacgtgagcaataccgggatcaccttcttcgtcatcttcctctacaccaagttcttcgactggtggtgggaagcgatgccgaagtacctgttcttcctggtgctcggcctcagcgccctgctgatcctgctggtcctgcgccgcctgcgcacgcccctgggcatcgccgcgaggactgacgcatgaatcgcaaccgtcgcaacgccctgatcgccggcagcctcctgctgctggcggcgaacctggccgccctcggtggcgtcgcctggaaccggtccggcgaggccgaaagcaagctggtgctcagccagcgcgagctccagcgcaactggtcctacggtttctggagcgaagagaacagtggcgtcgaactgcgcctggagcttcgctcgccgagcagcgagccgcccagtgacctcgctcccccgctgccgcccgagcagatgcgcgccctcggtttcagcatcccggacgcgctcgacgaagagagcgtacggcgctaccgccgccaacaggaaaaacaggtgctgctggtcctggagctcgacggcccggcctatcgccgcgaagtacgcctggccgaggagcgcctggccgaggccagcgcccgcagcaaggccctgcccaaggacgaaatgctgtccagccagatggaagccgctcgccaccaactgaagcatgagcagggagaggccagccgactgttcatcgtcgacgccggcctcgacctggccgccctgcgccagcgctaccccgagcgccagcgctacgccatcgtcaagggccgggtgcgtccctggtccgcggtcgacggaggcaggactctggtcggcggctacatcagccgtaccgacctcgccgcgatcaacgtgccacgacaatggcacgcggtattcgccaaggtcgacgaacaaaactaccggctagcgccgctggaactgcacctcagcttcggccagcgcctggagccctggatcaccaacgccgttcgccgctgaaacgccccgcctggcgcacgatgcttgcatccgcgcgccgggccctgcaccctgggcacccgccagccatccaccgcgccatgaacagcgaaatcgatccaggccgctgcccgctgtgccagcaatccaaccgctgcaccctggcctatcccgctagcgccacccaggcttgctggtgcttcaccacggagatcgatgcggccgtgctggagcggattcccgccgagctgcgccgccgcgcctgcctctgcccacgctgcgcgcaactgctgccgcccgacgccgacgactgatgcgcctggaccgcttcctcgccaacctgcccgaactcagccgccgcgacgcgcagatgctgatcgccggtggacacttgcgcgtggacggccaggtggtgcgcgacggcacccacgaggtgcgggtgttcagccgggtggaactggacgagcggctgctccaggctggcaagccggcgcgctactacatgctgcacaaaccgatgggctgcgtcagcgccacccgcgacccgcaacacccgaccgtcctcgacctgttcccggaagacctgcgcgacgacctgcacattggcggtcgtctcgactacaacaccaccggcctgatgctgctgaccaacgatggccagtggtcgcgccgcctgaccctgccgggcagccagcgcgacaaggtctactacgtggaaaccgaggcgcccatcgaccaacgctacgtggatgccttcgccgccggcctccacttccgcttcgaagacctggtcaccctccccgcgcagctcgaaccgatcggcccacgctgcgcccgcctgaccctgcacgaaggccgctatcaccaggtcaagcgcatgttcggccacttcgacaacaaggtgctgcgcctgcaccgcgagcgcatgggcgatatttatctcgacccacagttgccgccgggtgcctggcgccccctgaatgctgaagaaatctgttcggtgtgaaaccccgccgcccgccgcctgtccaccgaaagaggccggaccgcaggggtttggccggccgtcgcgagcgacgctaagctgaatggcatctgtcggagcgacagcctttcccgcatggagcaagagaaagcgccaatgaaaagatcccttgccgtactgctgctggccttcgccgtcggcagcctccacgcggcgcccgccagcccagcgaacgcgcctttgccgccggccgacatcaaggctcagctgaagagcatgaagcccggcgagtacctctggtacccggaggtttccccgcagggaccagtgaccatcgtggtcagcctcaccgaacagaaggcctacatctaccgcaacggtatcgccatcggggtcagcaccctcagctccggcaagaagggccgggagaccccgaccggagtgttctcgatcctgcaaaagagcgtcgaccacaagtccgacctctacaacagcgcgcccatgccctacatgcagcgcctgacctgggacggcatcgccctgcacgccggcaacctgcccggctatcccgcctcccacggctgcatccgcctgcccatggcgttcgccaagaaactctacggcatcaccggattcagctccaccacggtaatcatttccaacgccagcagcgcgccgaaggaagtcgaccaccccggcctgctggcaccgacggtagcggacgggcgaccggtgacgctgccggtggagcccggagaaatcgcctggaacgaccccggcgcggaacgcggtccgttgtcggtgctgatcagccgcgccgaccagcgcgcctatgtctatcgcggcggccagcgcatcggcaccgcaccggtgcagttgccggcacgcccgcaaaccggcatggcggtgttctcgctgctggaaaagccgaccccggaagaaatcagcgagacctcgccgaacctgcgctggtcggtggtccaggtgagcaacccgggacagggcctgacaccctccgagcaactgggcaagatccgcatggacccgaccttcgtccgcgaaatgctcggtgccatggacgtcggcagcaccctggtgatcaccgactgggcctcgacccgggacacccacagcgactccgatttcacggtgatcgccacggaaacaccgaacaatccgacgaaatcgcttaaaaagtagtcggcaagttgttcaaaaatcgagcacaatgcctctcatccggtaaaaaccacactgaaccgatgggaatactgctcgtatgccaaccttcctccgtgccgccctgcgcaggctgagcctggcgggcgccaccctttgcgcactggccagcgggccggtattcgccatgccacttccctccgccaaggacctgcagaaactcgctccacaggccagcctgccaaccctcgaactggcccttaccgcctatgcctgcgcgagtgccagccagggcggcgacaacggcctgctgacggtgatcgactactcccggccgtcgcgcgacaagcgtctctgggtattcgacctgaaggcccgcaagctgctcttcgaagagtgggtgacccacggcaagaacagcggcgatgaccttgccacctccttctccaaccggccgaacagctaccagtcgtcgatcgggctgttccagaccggccagctctataccggcaagcatggtcagtcgctgcgcctggttggcctggagccgggcttcaacgacaagagcgaagaacgcgccatcgtcatgcattccgctgcctacgccgatcccagggtggttcccgggctcggtcgtctgggccgcagccagggctgccctgcggtacgcccggccgtggcggcccggctgatcaacaccctcaagcgcggcagctacgtgttcgcctactacccgcagccgaagtggctggagacctcgcgcttcctcgccccgcagagctgcgccgtggcacgtgcggcgcgtacgccggaagtcatcgccagcctgctcaaatgaaccgccggggcggcggccgcgccgtccctttccttcccggcatcccgaaatcgcagcatcggtacttgcctcgcggcatttcgtcggattccagccccccttcccccatccaaaagcgaaacagggcttgcagtccggcacgccggctgcttaactgacgctcacgttgtgactgaccagtcacaaacgacttccaagaaagcccgcgtgactgcccgcgcttcggcgccggcctttcctgcccggccaatagccgcttcgccaaaatccgagaggatttcggacgctctctatttgcctgtaagtcgttgaaaatcaaaagtttatcaaatccatccgaatgacattcaactgtcattgggaggcgctttcatctgcccatgagcattttgtattcgccgcgacaagcaggtcgccgcgttcccatcgaacgattccaggaggaagcgacatgaggccggaaacagccatcatcgagatccacgggcaatacaggattcacaccgagttctacggcaaccccgcggcgcagcagaccatcatcctggtcaacggctcgctgtcgaccacagcgtccttcgcccagaccgtgaagtacctgcagccgcattacaacgtggtgctctacgaccagccgtatgccggccagtccaaaccccataacgaaaaccacacgccgatcagcaaggaatgcgaggccaggatcctgctggaactgatcgaacgcttccgtgccgaggtagtgatgtcgttctcgtggggcggcgtcgccaccctgctggccctggcgcaacgtcccggacggatccgcagggcggtggtcaactcattctcgcctcagctcaacccggccatgctcgactacctgcatcgcggcctcgactacctcgccgcctgcgatcgcacccagatcggcaacctggtcaacgaaaccatcggccgctacctgccacagttgttcaagcgctacaacttccgccacgtcagcagcctggacgagcacgaataccaccagatgcacttccatatccgcgaagtgctgcgcctgaacgccgatagctataccgagagcttcgccggcatcgagatcccggtgctgttcatgaacggcgagctggacatctacaccacgccccacgaagcccgccagttcggccaactgatccgcggcgcggaattccacaccatccgcaatgccggccacttcatcgacgtcgagcacaaggccgcctggcagcagacccaggacgccctgctggccttcctccgcccgcagcgcacgcagccgctcaacccgatctaccgcccccagcccaacggcgccagcgtccccctcgccgccctcgccagctaaccgccaccgccacggggagccccgctcccctggcggaaaaacccagcgaaatcaacaaaaaccccgccccgggcttcacctgccgccgcgcatctggtaaaaaggcgccctggccgcaaaagccgtccgagcgggcgtcgtataatggcattacctgagcttcccaagctcatgacgagggttcgattcccttcgcccgctccagatcccaatgcaaaagcccctgaaaccaaccagtgccaggggctttctgttttcaggctttccccgcctaaagcccgggaaagatcggaagcgccccctggatttcggcggaggcgcagccggaaggttcctcttccttacatcatcagcgagtaggcccgctccaactggtccagatcgatatccagaggcagcggcaggggcgcttcgccgatgtgctgctcgctggcgaactttccctcggccaacacacgtgccgggtcgttgagggcgaggaagtcacccccgtcgtattcccagaagttcagcggtgagcggccggaataggtttcgttccagcaggcgacgtacgaacgttcgcccaggactttcggacggcaggaaacgtagggttccagatagacctcatgggtgaggtacaggaaggtgaggtcatccacgcgataggccggcgcttcgctgacctcctgaggctcctcgtccagttgcgcttcggggttcgctcccggatcgaccgctgcgacagcggaaaacccatccgcccccccaggctctcccatggccatgcctccgccgatgaacagggaagcaaccacgaccaataacttcaacacgacgcgtcctcgcctgaaaatcgcggagattacgccgccaacttttcaggtatgcgatcagggtggcccgcaaccttccgccccgccgcccgatatcgggcaattcctacacgacggaagacgcatccacctgggcccgcacccggctcgtcttctcgctcagcgctctttcacggtgttccgcagcgaattagtaattatctgtaggaataactcctcaacagcctcgtatcacttccgctcgagccgaatctcgaccagcttgccatcgatgaagcgcaagtgtcggtagacgcctccactggggccatacacccagaattcggtgcgtgcggcattcaacttgggcacgccgttgttgcgcagggcaggctcgttgacgatcctgctcagcggttgcccgcacctttccaggacttgctcgacgctgtcgccctcatccaccagatgcgtgccacatctcatcgaggcgacggcaggaattgccaacgaagacatgaacagcgtcagcgccgtgcgaaacatggatacctcccgcttcccccgataatgaaagcgcggaccgccgcggggcgaggcgaactccctcacaaaggcgcaagcgtcgcacagcggcatggcgacgcaggcagttccttgccgccgcttcgccagcttcgttagactgccgcatcgcagcacgctttcgtggctgcgccctccccgatccgaggcttgcatgttggagatagtagtcatccgataaccgccacttcgtcatcccgcacgaggtgtcgccggttatctgccttcgccatggctcgcacgcgccttttcgcgcagtgcggccgcgttgtcataccgatgattacaggttctaccgacatgaacgtttccaagccggaacaacggacgcttcacgccttggcccagggcggccatatcgccttccttcgcgacgcttcgggcaagatcacccgcatcgagtgctacaaccgcgacggccacctgctgctcgactgcaccctggcggtgttctccaggctgaagaacaagggcctgatccactcccgccagggcaggccctaccggatatccatggccgggctgaaagccgtgcgcccgcaggcggacaatcgctgacccccttccttttccattgcccccgccgggacaaggcgggggttccgaggagtgcttgcatgaatatttccatccgtgcggaaacgcccggcgacatcgacgccatcgcccgcctgaccgaagccgcgttccgcaacgaaacgcatagcagccataccgagcagtacatcgtcgatgccctgcgccgtgctggcgcgctgacgctttcgctggtggccgaagcgaatggccaggtgatcggccatatcgcagcctcgccagtgaccatcgatggcgaagcgggcggctggtacggcctcgcgccgctatcggtggcgcccgggcgacagcgccagggtctcggttcgcagttggtccggcgcctgctcaccgagttgcgactgctgcccgcgggtggctgcgtggtactgggcgaaccgacctactactcgcgcttcggctttcgggtggaaagcggcctggcgttgcccggcgttcccgccgaatacttccaggcacagtccttcagtgggcgcatggcgcgaggaatagtggccttccacgccgcattcgacgccagcgactgagccggaacgacagcagccgctatgtcgccccctggtcgcgggctcaatcgaactgggtacccttctggatcagttccaccttgtagccgtccgggtcttcgaggaaggcgatcacgctgcgtccgtgctgcatcggcccggcctcgcgggtgacccgatagcccagcgccctggcccgggcgcaggtgacggcggcatcctcgacttcgatggctaggtggccgtagccgtcgccctgggtgtagccgtcccggtcccagttgtgggtcaactccagggcagcggccgcgcactcgtcctggtagccgacgaaggccagggtgaagcggccgtcgggatagtcccggcgccgcagcaggcgcatgtccagggcgcgggtgtagaactccagcgcggcctcgagatcggccacgcggagcatgctgtgcaggattcgcatggaaattctccgtggagtccggcggcgagccgccggagcgggaatcaaccctcgacgcggtagcccttgaacaggaaaagcggaccgaaggcgtagctgtcgatcagttcatagaagcgcgcgatggtttcgttgcggcaatgctggaggaacgccgcctcgtcttcgtacacctcgtcgaggtagaagcggttgcggttgttctcgtcgcggatcacctcgaagcgcagggtgcccggttcgttctgcaacgagccattggcatcgaacaggcctgccgcggcgaacgcttcgcgcttgtcggagggaacgtcgaactgaaccagtacgtggtaggtcatggaatctttcctcgtgaaatggggttggaagcgatcgcgaggtccatgctagggtggccttacactcattaaaagtaatcaataatcagcaaagtactcacttaaagagaattatgtgaaactctctcaactcggattcttctgcgcggtggtcgaacgcggcaccatcgcagccgcggccgaacagttgcattgcgtgccgtcgaacatcactacccgcttgcgcgaactcgaaggacaactcggcgtagccctgttcaatcgcgaaaggaaccgcctgctggtcacccccgagggccgcctgttgtaccgccacgcccggcgcctgctggcgctggccgacgagaccgccgcgctgttcgccggcgaccaggcgcacggcgcgctacgggtcggcgcgctggacgtggccctggccaatcacctgccccagcgcctggcccgctaccgccgcgagtcgccgggcgttgaactgcacatccgcccggagcattcgctgctgctcgagcgtctgctgatggaaggagagctggacctgatcgtcaccgacggccccatcgaacacccgttgctggtcagccgcctggccttccgcgagcgcctgttgcgggtcactcccgccgacctgccggcgcccactcccgaggacctcgccagcctcgaactctatgtgttcggccacacttgccactaccgccgccaggtcgaccgctggctggcggagagcggtatccagccgcgggcaaccctggaaatcgagtcctacccgagcctcttcgcctgcatcgaggccggtctcggcttcgcctgcgtgccggagagcttcgttgcacgcatgccctccacgcgacggggtttccatgccgaaccggtagccggcctggactccagcgatatccatttcgtctggcgcaaacagcaagcctcgccgctgatccagggcttcatcgacagcatcggcgccgactgacgccaacgaacgatgccgcaacacaaacgcactcggaaaaatcggtaacagcggaaccactgcacagaccagagaaaaagccgccaccaaccaggcctggcggcgacaccggaagtaccctcggcggccgattgccgagccgatctcctacctgccccctgggttttccgacgaaagaccttgattcgtgggaggtagggtcgtctccgctagatacccctcaaccctgcgtgcgggctccatgcccgagcgccttggcgagatttgcccatagagccatcacttatgactgcgacagacagaacgcccccgccattgaaatggctctgcctcggcaaccgtgatgcgaacgacggattcgagctcttcgcccatggcatctatgcgaggaacggcgcgttggtcggcagcaagctctccctgcgcgaacggcgccagcgcgtcgacctgtcggccttcctttccggcgcaccgccgctgcttgccgaggcggcggtcaagcacctgctggcgcgcctcctgtgcgtgcaccggcacaacaccgacctcgaactgctcggcaagaacttcattcccctgcatgccagcagcctgggcaacgccggggtctgcgagcggctcctggcctcggccaggcaattgcagcagcaccagattgaactctgcctgctgctggccatcgacgagcaggaacccgcctcggcggagtacctggcgtccctcgcccggctacgcgacagcggcgtgcgcatcgcgctgcacccgcaacgcatcgataccgacgctcgccagtgcttcgccgaggtcgacgccggcctctgcgattacctgggcctggacgcgcgcctgcttgcccccggcccgctgacgcgtaacctgcgccagcgcaagagcatcgagtacctgaaccggctgctggtggcacaggacatccagatgctttgcctcaacgtcgacaatgaggaactgcaccaacaagccaacgcactccccttcgccttccgtcacggcaggcactattcggagcctttccaggcctggccgttcagcagtccggcctgctgaacgccgatgcgcctgccagccgtcacgccaggctggcccgctatcccgccaggcgctacccttggcggtttcgacggacagggacgacggtcatgggcaactatttcgagagccccttcaggggcaagctgctctcggaacaggtcagcaacccaaacattcgggtggggcgctacagctactactccggctactatcacgggcattccttcgacgactgcgcccgctacctgatgccggaccgcgacgacgtggacaagctggtcatcggcagtttctgttcgatcggcagtggcgccgccttcatcatggccggcaaccagggacaccgcgccgaatgggcatcgaccttccccttccacttcatgcacgaagagccggccttcgccgacgccgtgaacggctaccagccagccggcgacacgctgatcggccatgacgtctggatcggtaccgaggcgatgttcatgcccggcgtacgggtcggccacggagccatcatcggcagccgcgcgctggtgaccggcgatgtcgagccctatgccatcgtcggcggtaacccggcccggaccattcgtaagcgcttttccgatggcgatatccagaacctgctggaaatcgcctggtgggactggccactggccgatatcgaggcagccatgccgctgctgtgcgccggggacatccccgccttgtaccggcactggaaacagcgccaggccacggcctgacggttggacgaaggaggtcgaggatttttctcgggcccgatggcctaccctctatgcttccgacggtatactgtcgcgatgcctggccatccaggcatgcgtgccagagccactccagcgaccgtaccggcggagcgaaacgctgtgtttccgacagcccgcgccgagcaccgatcgccggaacgatcgcaggacttcatgaccgacggccccctggagcggctaccgggcaagacgagtgacaagaacgacacatgattgaagaagccacttccagcaagcactcaggcacgacggacgccccgctggtatccgtcgtagcaccctgcttcaacgcggaaaagtacctggaagaagccctgcgcagcatctacgagcaggactacccgaatttcgaagtgatcatcgtcgacgacggttccaccgacaacagctacgccatgctggagcagttgcagaaagtccacggtttccagctctaccgccagcagaaccagggcgtcagcgcagcgctgaacttcggtctgcaacacgcccgcggcgactacgtagccacgccggacctggacgacatcatgctgccgcactcgttgagcgtgcgcgccgcgtacctcgaccagcacccggaagtcggctgcgtcggcgccctggtgatctacatcgacagcgaaggccaggaaaccaagcggcagaacggcaaccgcatccgccagctggacttcgactacctgctcggcaacgcctatgtctgcggcgccccggtgtccctgtaccgcatggaggccctgcgcgccgccggcttctacgatcccgagatcaaggtgcaggacttccagatgaccctgcgcatcgccagccagggctaccagatccacaagctgccggtgctggtcacccgctaccggcgccaccctgacaacctgtcgcggcgctacaaggtgctgctcgatgccgacctgcgcaccatcgcgccctaccagtcgcatcccgcctacgagcgcggccgcacggagctggtcaacaaggccctgaagtacgccgtggtcgcggacaagcggcatgcctggcaactgctccgctcgctgccgctgcggcagtggaaccgcaccaccttccgccggttgaagcgcttccttctccatcacgagaccacctgagccccgtggactccaaggtggcaaggtaattcgatgaaattcctggaaaaactgaaaaaacgcaaagagcggaagtacttccgtggctgggaaaagatcttcaaggccccggagaagatccgtcttgcctacccacattacgaggtcggcgtgggcacctacgggatcccggaggtcaccgagttcggcgacaaggccaccctaaggatcggcgcctacacctcgatcgctgccggcgtgaagatcctcctcggcggcgagcaccataccgactggctcaccacctaccccttcccgaagatgatcgatgaggtcgccgacatccctgacagcaccacgacccgcggcgacgtggtcatcggtagcgactgttggatctgcacgaacgcgctgatcctctccggggtcaccatcgggcatggtgcggtagtcgccgccggcgcggtggtgacccgcgacgtgccgccgttcgccatcgtcggcggcaacccggcccggcagatccgctggcgcttcgaggaagacatccgcgaagccctgctggcttcggcctggtgggactggccggtggacgaggtgaagcaggtcgcccggaccctgtgcagtaccgacatgacagccttcctgcgctacatcgagcaacgcaagggctgattccccggcgggaatgatcgccggtcatgggctatacctccccgatatactttggtttcgaattgccgcccgacaacgggtaggccggccgcttgacgcccgcggccgttcttcgagggagcttgaatgaccgcgctgcacgacctcccgggaacccgcctgctggcactgttcgcccgccgggaactctcgcctggcgagtactacgagcatctgctggcccacattcagcgctgggaaccgcatctcaacgcgctgtatcgcttcgacccgcaacggattcgcgaacaggccgcggcggccaccgagcgttggcgcaagggacagcccaaaggcccgctggacgggctgccggtaaccatcaaggagctgatcgcgaccgctggcgaacctatcccattgggtagcgccgccaccgccctgcaacccgcgccctgcgacgcgccgccggccgctcggctgcgcgaagccggcgcgatcgtcctggccaagactacggttccggacttcggcatgctttcatccggcctctccagcttccacggagtcacccgcaatccctggaacctggccaacaataccggcggctccagttcgggcgcggcagcggcggccgccgccggctacggaccgctgcacctgggcaccgacatcggcggctcggtgcgtctgccggcgggctggtgcggcctggtgggcttcaagccaagcctcgggcggatccccatcgacccttactacaccggtcgctgcgccggtccgatgacccgctacatggacgactgcctgctgctgatgcgctacctcgcgcagcccgacacccgcgacgccaccagcctgccgccggaagtgctggactggagcgccgagccgctgtcggtgcgcggcctgagggtcggcctgcaactcgaccccggctgcggcctgcagcccgacgcggaaatccgcgccgcgatcgaggccgcggcgcggctgttcgaggagcacggcgcccagctcaggatcgtcgaaccgctgatggaccggagcctgctcgacggcctgaacgacttctggcgcgcccgcctgtggagcgaactgctgctcctcgacgagacgcggcgggccagggtgctgccctatgtccacgcctgggccgagggcggcgcacgggtcagcggggtcgatgcggtgcgcggtttcaaccagaccttcgagatgcgccggcgcgccgcccggctgttcggcgagatcgacctgctgctgacgccgaccaaccaggtcgaggccttccccgccgactgggcctcgccgctgaacgatccgcagcggccgttcgagcacatcgtcttcaccgtgccgtggaatatgggcgaacagcccgcgctctcgataaactgcggcttcacggccgccggcatgccgatcggcctgcaactggtcgcgccgcgcttcgccgatacctggctgttgcgcatcggcaagacctacgaaggctggcgcggtccgatccacggctggccccggccgccggctgactgaagccggcagccgctcgtcgctcggctccaggcctgagtgtttcagtcgtcactccgagagggccttcgccatgcgctcccccacccgtcccccggcggccgccgatccggccagccgccgcagcgtctttgccgtggtcctcggcaacgccgtggaattcttcgacttcggggtctatgccaccttcgcggtgatgatcggacggactttcttcccctccgacagcgccttcgtcagcctgctcctgtcggtcaccgcgttcggcgtcggcttcgtcatccgccccctcggcgcgatccttatcggcgcctacgccgaccgcgccgggcgcaagccggcgatgctccttaccctgttcctgatggcgctgggcaccggcggcatcgcggtgctccccggctacgacagcatcggcccggccgcgccgctgctgctggtgttgacccgcctgctgcaaggcctggcctggggcggcgaggccgggccggcgaccacctacatcctcgaggcggcaccgccgcacaagcgcggcacctacgcctgctggcaggtcgtggcgcaaggcatcgcggcggtcgccgccgggctgatgggctacctgctcaccctctggctcgacgagcgccaactgcaggaatggggctggcggattcccttcgcggccggcctgctggtcctgccgatcggcctgtacatccgcctcaacctggccgagaccttttccggacgcggccgccaggccagcacccggagcctgttcggcgagttgttcggcaatcatcggcgggccctgctgctcggcctgctgatcctctccggaagcaccatcacccagtacttcctcaactacatgaccaccttcgcccttaccgagctacacctgccggcgggcatcgcgatgctctcgacgctggtcgccggcgccgcactggcgctctcggcgttgctcggcggcgtgctctgcgaccgctacgggcgccgcgccgtgctgatcctgccgcgcctggcgctgctcgcggtgctgttcccggcactgcaggcaatgacccgtcaccccgagccggcagtcttcctcgccgtcctcgccctgctctcggccctgcatggcatgagcggcgcggcgctgatcgtgctactggtagaaagcttcccgcgggcgctgcgctccaccggtttttccctggtctatgcgaccggcgtcgccgcgttcggcggcaccgcgcagatcgtggtgacctggctgatcggcgtcaccggcaatccgctgtcgccgctgggctacctgctgctggccaacctggtctgcctgggtggggcctggctggcccgcgagacctggccgggtcgcggggacatgggaggcgcgccgctggtgctgcgcgactgagaacttgcgcggttcgttcaagcgccgccggcctgtcgcgagcgacgctggggacctcattcatccggaggtcccaccatgcagttcttcctgcgctacgcctacgcgcccctcttctggtccggcttcatcggcctggcgacctggcaggtcggctatcgccaggcttcccacgcctggctggtcgccctgttcctcggggcgctcggcctgtcctttctcgccgaacgacgactgccctaccagccacgctggaaccggccgcacgccgaccgcctgcgcgatgtcctgcacgcgtcggtcaacgaaagcctgaacgcacttggcatcctcgccctgccactgctggccggagtcctgggcttctggccggtgtggccgcaggcctggccgctgtggctgcaactgctgctggcgatcgtcctggccgatctcggcatcaccctggtgcactacgccagccaccgttcggcgctgctttggcggctgcacgcggtgcaccatagcgtgcagcgcctgtacggtttcaacgggctgatgaaacatcccctgcacctgggcctggaagcgctcggcggcaccctgccgctgttgctgctcggcgtgccgcagacggtcgccgcgctgctcgccttcgccatcggcatccagttgctgctgcaacacagcaacgtcgacatgcgcatcggcgggttacgccatgtgttcgcctgggcaccgctgcatcgcctgcaccacatccgctacgggcgcgccggcgacgtcaacttcgcgctgttcttcagcgtctgggaccgcctgctcggcaccgccctccatcgtcccgactaccgcctggacagcaccgacatgggcatcggcgaccagcctgactatccccgcgactatgccggccagttgctcgcgccattccgcgacctgccacgcagcaggcacgtcccacagccgccggaaggattggggcgttcagccggccaggcgtaggtgcggcagcgacaggccggcgcggataccgagcaggctgcgtacgctgcgcgacaggtgcgcggcgtcggcgaagccggcgtgatgggccgcctcggtcaggctgcgcccctgcaaggccagggcgaaggccaggtacaggcggcgccagagtaccaggcggcgtaccgacaggccgacctggacggcgaacagccgctccagttggctcagcgaaagactggcgctgcgcgccagtctttccgcctcgacccgcgccgcgagttgctcgtcgagcgccgccagggccctttcgacgcggcggtcgagccgtcgacgaggcagccgcgcaagccgccccagcaacgcctcgggctcgccgggagcgtcctcgagaagctgacgcaggtcgtcgctgtcgaacgccagcggctcggcgtacagcgccagcaacggctgcgacgcgtcgacgcgatgggcttgcagcgagggcaccagcaagcgccgggcctccagtacctggccagcgacgcgcacccgcagcggcgtctccgccagcagcaactggtgggcatagtgcgcgtgctcgcgggtatcgccgttgaccccggcgaacagcgcgtggtcccgcgccagccagacctcgccctgccaatgccgctccgtcatcgcgtaccttccgtcaaccgttccgtggcgaaacggtgtcggctatggcgaccgccgtcaagcccgcaaggtcagcgtccgaaccagtcgcgccgatcgtcgaaggcgtgctcgatcagatcgagcaaggcacgcacctccacgcggttctccgcttccggctgcacgctcatccagacttcccgccgcatcggctcgtcgaagacctgcggcaacgccgccaggttgcgctccaggcgtccggcgtaatgcggcagcaggccgatgcaggcgccccagaggatcgcctgtagcagcaggtcgtggctctgtacctcgatcactcccgactggcgagccgccacccgccggttccagggcgccagggcggcgctggcggcgtgaccgtggagctgcgccagcaggtagtcgtccagctcgtcctcgctggccggccgcgtgcgctcgcgcgaatagcgcttgccgatgtgcggctggtactccagctcggcgatgcgcgccggtgcggcgaagtggccttccatcggcggatgcggctgccccggatcggcgatccagatggcgatctccgccggccctgcgctttccggccagccctcgcgcaactcggcgagggctacgcgcaggttggcgttcttgcgcaggtagccccacagctcgcgactgagcacatcgtgcaggacgctttcggccaccgccaggcgcaccagcggctgttgccggtgaagatcggcgtggctctggctgtcctcgaccaggcgctgcccggcggcctggacgatgcggccctcgcgggtcagcgagagggcgttgccctcatgcacgaacagatgcaggccgaggcgctcctcgagccgggccagggtcttgcgcagcagtgtcggcttgacgtccaggctgcgcgcagcctgcatgaaacagccgcaacgggcagtgaccaggaagaaatgcaccacctccagagaaccgaacagctcgtgccaataggcacggtcgtcgcgtccctgcgcgggcctgagcagtgccgggcgctgcccggcggactccgatagggccatgcttcctcgctagcgtccaggcatgaggcgaatccgcagttcgatcggctgcggcatgtgttccggcggcggcaggcgcaacgaacggtccatcagcgcgcgccgcagttcattctcgatcggctcggcgtcgctgcgcaggcaggcgagacggacgatccagccgcgttcgtcgagccagacccgcaggtcgatgtcggtattcggcaactgccccgccgcgcgccgcgactccaggaaggccagcagccgcggcgcggtttcggcgtcttcgcccaggcgctgctggacctgctcgccgagccatgcggcataggcgccccagagccgctggcgttcgtcgcggaaccgctcgggctcgccgaacagccagctgcgcaggtgccgccagcggctcgcgcgcggcccacgcctggcctccgggatgccgtccatcagtgcagttccgccagggtcttgccgagcaacgcgccgtcgatgctcagggtagcgttgttcaccaggccatccaggtaggccttggctatctgctcctggcgttgcgcgcgcaggctttcgcgcaggcgaccacggacctcgtcgagggtggcgaggcgggcgtcgcgacgctcggtcagcttgaccaggtggaaaccgttggcgccctggatcggctcggacaccgcgccgacctttagccgttccagcgccggacggatcgccggcagcagttgcgcctgcgccagtaacccaccgatgtcgccgccgttgcgggcggtctgcgggtcgtcggaatgcttgcgcgccagttcggcgaagtcgccgtccgcggcctgccggtagagttcctgggcgcgcttgcgcgcttcggcaagcccgccggccgcagaggcggcgatgaagatctggctgacccggtacagcgccggtacagccagttgcgccttgttcgcctggtaggcggcctgcagttcggcatcgctggggtagtcctcgggcaccgtgctcaccgactccaggtaggtacgcaggacgatctgccgcgccgccgcatcgatcaacgtcttcacctgcggacgctgttgccagtcctgggcgctggcctgttcgtagagcgccttctcggcgagccgcgcacgcatccagcgttccagtgcgtcgcggttctcgctcaactgcgcgcgggtttccgccggcacctcggccagcagcgccttcagttcgtccggcgccacctgcaaggcgccgaggcgggccaccgcgggttccgcggcggcgctggcagatggcttggcaagcgcggcctgggcctggcccgcgccgccgtcctcgcgctggccacagccggcgagaacggcaagcgcgaacgccaggacgccgcaacgaaatgccggccgcatcggctcaggcctcgccatcgacgggttgaccggcatcctgcgccatgccctgctgctccgcggccaggcggctgtagtcgcgcagataggcgatgaactcctgcagcaggcgatcccacagttcgatatggctacgcaggttggccgggctgacgccgccggcgacgatcacgtccatttccatcaccaggaactcgccctgctgcgacaggcggccgaagcgccggctgagattccagcgctcggtcagcccggcgggcaattcgccctgcacgcgcagggcgcagctgaaggtgaagtcgaggtagctcgccggcgtcgccgccggattgccgaagcgcaccgcgtagccgattccctggctggcactgagcagttgcacgacgccgttctgctcgctgcggttgacccggtagccggcgtcctgcaaggcctcggtcaggctgtcgacggaaaggtgttcgatcagggtgatgtcgttcatgtccgggttcctggtttgctgtcggatttcactgggcgagcgccgcctggcggttctcgacctgggtcttgtagaggtcgtcgccgagcttctgcgccatctcttcgaatttcacccgcgcaccgctggcgaacggttggcggatcttcatcacctcggcgacgctgacgttctcgtaggcgccgaggatctccttggccacgccatacatctcccgattcttcgcggtgcactgctgcaactgctggtcgtgctcgcggaacgccaggtcgagcttctgccgctcggcctccttggctcgcgccatgaccagcaactcgtcgtaggcctgcttgtacttgcccagtcgctcgttgctcgcctcgaccatctgccgcgcccggtcgtgcaagccctgttgctgggccgagagctgctcggcctggcccttggcccgggtcagctcggcgctcagttgcttgacctgggccagcgccgcatcgcgctggctttccagcgcggctttcgccgcggtggcctgggcctgttcggtctgcagcgcctggagttgctgggtggtgctgcgcaactgggtgcgcaggcgttcctccaggctgtcggcgtaggccgcctggctggcgtaggcggcgaaggcggccccggcgagcagcgcctgggcccagatcggtaatgagaaaggtcgcgtgttcatggtctgcctcttcatggtctgcctcgaggagcgctcagaagcgcgtgttgacctcgagttgcaggacgtcgatggagaacggtgcgccgtagacctcgtcggagctgagccagcgcgcggtaccgtagacgcgcttgtcgaagccatagctggcgccgaggatgtagcccttggcgttggtcccgccaaggtggaaggtggaatcgttgaaaccgtccggcagggcatccggctggatgtacttgtaggcggcgaagacctgccagtcgccggcgtcgcgcatgtctagggcgttgcccagggtgaactggagcatccaggcgttcgccccgctcttgatgtcgccgtcggagccgaggttgttggcgatctgcgccacaccgccggcgcgcttgcgcatgtcgccctcgtcgtagcccaggttgtgcacgtagttgccggccacccgcagcttgaagtcgttgggcagctcggcatcccagccgaggttcaggtcgagcaggttgaactccgaggccaggccgacgtactgcgggttcggcgtgttcgccgggtcggccgggttgggcacgatgtcgcgcaggaggaacaccgtgttgcccttctgcatgaaggtcggtcggctgccgtcggtgtcgcactccggatctcccgcccagggccggcaggggctggaacgccgcccttcgatatcgtcgaagcggtagtaggccagcgcgccggtaaggctgtgctgcgggttgatcttccaggtggcgcccaattgcgcgccgtacatccacttgttgtcgctgtcttccttgtcgaaaccgttcgacgaggcggtgtccgagctgtactccacggggaacgcgccgaccgtgccgaacagcgagacatcgcggctcagcggctggttgaagatcgccgccacgccgtcgaagttgaggtcgttggaatacaacaggtcggtggacaggaacggattggcgatccgcccgccggtcaggctcaggcgctcgctgggcttccaggtcaggtagccctggtcgagccagaggtccttcttgccgaagccgccgccgagggtctgggtggtcgacaccgggttgttgtccgaaccggtgccgatgcggatgccggcgctccagctttccgacagcgccgccttgaggccgaagcgcgcgcgcaggcgcagcaggctgtcgcggtcctcgcgggtgttgagcagcggcggcaggcccgagctggtattcgggttgacgtcatagggaccgtcgtcgttgagttcggcgaagtcggtgatctggttgctgttgccgttgccgaaggagcgcgactcgtagcgcaggcgcacgtcgccgtcgaagctgatgcgcgaggcccagtccgggaaggcgttgggctgcgcccagttctccgccttggcctgggtcattacctcggccttcacttcgtcgcggatctggtcgcgcaccacctgcgggatatagggtacgcggacctccccggggaccgcggcgacggccgccgcgggcgccacggcctggcgcgcctgctgggcctgcaacgcctcggcctcggcctgcctgaccagcgcatcggcctgttccttcttcaacacgccctgctgtaccaacaggcggatcaggttgatcgtggcgttctccgagggcgccggcggctgggcctgcgcctggccggccagcgcggcgagcatgacgcccatccccagcgccagtcggttcactttcgcgttcatctgtgtacggctcctaaggtccttcaaggcagtcgcctgccggaaatcgttctgggttggcgtcttctcatcccggccgcttgccctgcagggcgatgcgcaccggcagggtcagcgaagccggcgggcgttcttccaggcggccggcggcgcgcagcgcggccagcaccttctggtcggtctcggggtcgccgctggagcgggtcagttcggcccgggtgatatcccccgaggaactcagccagatctccgcctgcaggcggaacgccaggttgcgcagctccgggttgtcccgcagcaggcgctggaaggcgtaggccaggtactggctatagctggcgttgccggcgcgaccgccgccggaaccggccatcccgccgcccttgccggcgccgatgttgaaagcgtcggagccggactgggcgtcgccatccatctgcatcgggtcggccaggtcgtcggccggcgacggcggcgcttcctcctgcggcttgacctcctccagttcgggttgcggttccggctcgacgatcttttcctcttccaccggctgctccggttccggcggtttttccggcggcggcggaggcggtggcggcagcgggatgatcgccggcaccttgggcgcctcgcggcgcacgccgctcatgtcgttggcccactcccagaccagccaggcgaggccggcgagcagcagcgcgccgaggccccacttgaggtagcgcagggtcgggttcgccgggcggccgtcgatggacagcggcgcggcatttttcggctcgggggtgtgcttgggatcggcggacatgttcatcccgggcctcaggtcggtttgccggtgaccaggccgacctgggacagctccaggcggcgcagcaggtcgaggacctcgatgaccttctggtactgcaccgtggcgtcgccgcggaccactaccgggaagtcggggttgagggccttctccgtacgcaggcggtcctccagctcgggcagggtcaccgggtaggcgtcgaggaacacctggccggcgtcgttcaccgagatcgccttggtcttgggctgcgacagcgccacggtggcactggccttcggcaggttgatctggatcccggcgacctgggcggtggcggtgaggatgaacatcaccagcaccaccatcagtacgtccaccagcggggtgatgttgatgctgtcgacggcgccgtcgtcgtcatcgtcgtggctgctgttcacggaagccatggcgttctcctcaggccggcaacggctggccgttgcgacgatgggccacttcgctgagctggctttcgccatgcacctcggcgaggcgggtgacgaactcgtcgacgaacacccgcatgtccgcgctgacttccttgttccgcgtgaccaggcggttgtagccgaacaacgcggggatcgcgacgaacaggcccatggccgtggccagcagggcggcggccatgcccggggcgatggcattgatgttgacgtcgccggccatggcggtgccgaggaacaccaccatgatccccagcacggtgccgagcaggccgatgtaggggccgccggcgatggcgttggacaggctcgacaggcgcgagccgagctgctggttctccttgatgcgcacgccgtccatggaggcgcggatcgcctcgatggtggccgcggagacggaagaggtgtcggcgccctgctcgcggcgggtacggatctccttcaccgccacctggtacaggcgccacagcgaggagtgttgcaggcgggcggccagctcgcggtcgtcggcgagcagttccaggcgcgtgccgacctcggcgaagcgctcgcggaacagcccgttggcacgactgacgcggccgacgttctggttcttgcggtacatgatgacccacgactggaccatcatcagcgccaggatcgcgatgatcacccaggcatccagcggcactgcgttgagcaggaagccgagcttgccgaagccgaagccggactgcttctcgtcgaccccgtaggccaccaggcgcgactcggcgccctgggcggtggcatcggcgaggagcagcgccgccgggcgggcgatcttcgacaggcgcaactcgtcgatggcgccctggaagggttgcagggtcggcgccgcggcgctcgcctcaccttccccgcttgccgcctcggtggcggccgcaggcgcgacctggccttccgcgccgatggcgatcgcgccgctgaacgccggcagcgccgccgccaggctggcgacttcgcgaccgccgagatacagcgccagccgggtaccgtcggcgaccagcgccaggtgctgccattgcccctgcgccagggcctggctggcggcagcgcgctgaccgttcagctcgacgaagggcgcgccctgggccaggccgaccaacagggcgttgccgccttcgcggcgcgacagcaggacctgttcgccggccagttggtcgggacgcacccagccgctgaagctgaaggtgccaccggcgctcaccgccagcgatgggctggccggcagcagcagcggctggcccagcagttgcgcggagcgaccgatgacgccctccaccggactgccggcggcggtctgcgcattgttggcgtaggcggtggagtcccgcggcggagtgcccggcgcaccgtcgaagtgatagaccagggtgtagtccgggtcgaacaccgactggccgttgccgctctccggcgccttggcgttgccgtagtacatccagatgtcctggcgctggccaccctccacccgcggcacgtcgacccagatcagggccatgcccatcagcgggtcgaagctctcgacctggtggcgcagcacggtcttgtcgtcggcggcgacgaagcggatgtccgagccgttctcgttgaccccgtcgaaggtgaagttgccggtgtgcaggcgcaccagcagcggcaggcgaccgagactgtcgttgatcgccgcgccttgcggggtggtatcgaccgagacctgcttgcggtactgccagtcgtcctgccaccaggcactggcgctggccggggccagcaggcccaggcagatcagcgatgtcagcaataagcgatacatgtggggttactccggggtcagcgtcagaagctcgcctgcacgctgaaatgcaggcgcgagtcgtgtttgtcggtgttcgtcccttccagcagcgggaaggcccagtcgaggctgccggacagccagtcggcgagttgcgcgcgggtgccgatgccgacgctggccaggctgaagtcgtcgtcctgctcgggcagcgcatcctgcaggcgcagttgcgcgccctcggcgaacacgtagaagcgccagtcgttgacatagctgccggcgcgcttgccgaggaagcgtccgagggacggcgtacgccattcctgggagagcaggtagccgtcgtcggcggtgttctccgccgccaggtagccacgcacgctggtggcaccgccggcagcgaactgttcgttggagatcagcggcccggaggcgagctggaaggccgccttggtcgccacctgccagtcgccgccgaaggtcagggtgtggttgagatcgcccttgagcacgccgaagccggacttggcgcgataacgcttgcggtcgaattcctcgtcgtcgtcgccgtagccgaggagactgccggtaccggccaccaggctcaggccaagggccaactgggaacgttcggtgtagcggaaaccgttgtagccgagggtcagcggggcgtacttgatcggcaccctgtcgttgttgccgccgatccgggtctgttcctcgaagtccttgaagtcgacgccgaaggagaacgagtgcgaccagaggccggtcaccggcaggctgtagatcgccgccacgccataggaatggccctggccgaccacattcatgctgcccaccgtggccacgtcgctgtcggactggtagccggacagctgcacgctccagcgctggctcagcggcgcggtataggagccggaccagaccttggcgttgtcctggtcctgcggcgcggtgaaataggtcagcgagatggcgtggccgagttgccagaggttgtcgtagcccagcgaaaccaccgagcgcaagtgacgggtgtcggcgctgtagtcgttgttcaggccgatgctggcgtgccagggattcttgtcttccacctgcaggtcgacgtccatggtgccgggccgctggccctcgcgcaccatcggcagcacctggcggccgggggtgcggttgacctgcgccagctcgcgctggacctgggcgaagtcgggcaccttgccctcctccagggccggcacttcctcgcgcaactccaccggcgaatagtgcttggcgccgaccacccggacgcgaccgacagtggtctcggtgacctgcaggtagaccaccccgccgctcacctgctgctccggcagctcgacgtagaccgactggtagcccttctcctggtaggcggcctgcagcgcatcgcgcgccccctcgatgtcgcccaggctgcgctgcggtccgaggaagggatacaccgccgcctcgatggcgcggttgtccagcacggtgttgccgcgtaccacgtactcgttgatgtccaccagacgctgggtctcggctcccgccgcggcgggaggggcctcgtcggccagcgaagcgcacgacaatgcgacagccaggcaaccgatcgaccagcgctggcgaaacgggtgcgcacaattgaacagcgaacgcttcacacggtcccccgaagttccatcgggacttattgttctaatgcaacaagtccgttcatcgaacagttctgtgaaagacaacaaactagcggcgacgcatgaacaacctgttaaaaacggcgcctgcccttatgaaatctcgttcttttctattttcactttcgtgctagatattcagccgtcgcgctccgccatggcgcgcttgccatgtatgcaacaaggcgaagttcagggagaactccggcatctgcatgagatccccggaaatcacttccccgataatcctgcctattatccttaccgcctccgcgctgttcagcaggacggttatatcgctgacgaaaaccggaaaattccagatcttctgcttcatttccaggccgacgaaccagcgatacagcaggttgtagttcaattgctcgtacaactgctgctcgctgggaatcgcgtacagcagttgcagcagcagcgcgtggatcagcggctccggggccaactgcatgccatgttcgcgggcgagcgccgagaggactttcgcctcttcgacaaggagactttctatttgcggtttcagcaacgccagggaatgtcccggtggtatatagctggacacttccttgagcgcaccctgccaatcttcctgggacactatccagacccatggcgccccatatcgataaaccgataccggtttcttgcgtgcggcttcgacgatcttcgataggcgctggtcaagttcctgcataccgactttcgagtaactttccatcaatactcaccgtccttcgccgtattcaccggagtgaccacggccgttagcggatactgttctcttgtttcagagcggaacgcgtcttgctcgaacgacacgctcatttccagcaaccggtcagcgcaaccgggaaatggccgattcctttcgttcccgtccctgcctttcaccgctgaattccgttttcctcattcacacctgtttgacggcaaccccgccgcaccaccgaacttttgtcatgaaaacttcatgcggccggccattcgcgcgccgccggcggggacgaacgggcattcacccgagaatcgaccagcgcctcggaagttcgccgaaaaaaaggccctccgtggggagggcctggcgggtatcgtgcctccgcggcggtgccttacaggatcaggttgccgcgctcttcatcggtcaattgactgcgcgcctgttcgccgagggctccggcgccgagcacctgcacggcgctgtccgggttgtagcccggcgaacgactggcgccgtcgcgcgaaggctccaggcgctcgttgccgaacccgagcacctgcaccgtgatcaccgacggcatgcgctgccgcgcggcggcctgctgctggcgactgacgtcctccgccgcctgtgtcgcggagctcgccgcggcgctggcggaggtcaacgccccggtattcaccgaagccaccagcggaatgccgctggactggccctgggtctggatgttcgccgcgttgaccacctgcagcgccgccacgttgacgttgccggaaacccggatgcccgcctcgccggcatcgatggtgccgagcggggcgatcaggtcgatgtcgcccggtgccacttcgggaatcgggttgagggtggcgataccggcgccggtgctgggcacctgcggcgacaggctgacgttgccccaggcgtcgtagatgcgccgcggcggggtgtacaccacggtggtctgggaaccgcgaccggcgttgatgtcgccttccgccgaccaggccaatatgctgccgccgaaggtggtcatgatgcggctctggccgagcaggatgctgtcccgcgaataggcctggatattgccctggccctgggtgacgatgcctgcggtggacggcggcgcctcgccctcgataccgaacacctggcgcccgccggggctgagcaactggatgtcgccgccgaagtcggtgtgcacgccggcaccgccatacatgacgatatcgccttcgtagctgatcggattgcccgccggatcgcgctcggggaacagcgcggcgatcgcgttgcgcccgcgcaggtagctaccctggcgtaccccgccgacttcgttgtactcgcggccgccggccctgagttcggcgaagtacacctggcgggcgaagatccgctgctgctcggcgggcaggccggcgaagaacgcctgggcctgttccgcgtcgccggcgaagccgaagcgctcgttcaaccacttggccaactcgctttcgtaggtcctgaccaccttgcccggctgctcggccagcggggtgccgccctgcgccaggttggccggatccaggtagcgctcgaggaaggcctgatagtcggcccccgccgcgccggcctggagcacgatatcggcacccggccggctgtcgcccggcaccaccgcgccgagactggtgatcgccgcgcgatcctccatgagaatgttgcgcccggcgctgatctccagggtacctgggccggcgacgttgaagttgccgtagaggatgtcgcggccggcctggaccagcgagaggtcgttggggtcgtcgtggacgaagaggttgccggtgaacgaggcatccgtactgatctgactgggagcgctgatacgctgtcccaatggggttccggaggcaacgatgtcgcgcccggcgcgcatccagacgggaccggcgccttcataccaggtttgcccggcgcggttccccgcctgctcgccgaaacgaatctgcgcaccgctattgagcccgacgatatctcctgtcaacgcatagaaacgcgccggttgcagatcgcgcgccaggctcgcagcgctatcggggccgaagtagaacagaggcaatccgccaatgacggccggattcccgtccggactgccgttgccggctatcgggttgagcagcgcggcatcggagtagccggcaaatgccggcgtccagatcgatggcaggttcgcaggatcggcacctgagcgttgcaccgaatagccaccggcataaatggagtctccagccagcaactccagttcaccgttgagcgacggtgccagtaacaaggagtagggagtggtcgagacattcaggctcacgcctcccatgtaaccgctggaaggaccgagatagatacttccttccggggccgccgcacgtactatcgatggatagatgaatcgcccatcgctaggcgacaggtttcggcctgccatgggaatagcgttggttgcctcgaccaattgggtgctgggcgtcaggttgccgcccgccgcaaacagatcgatcgaggtgtgtgcagtccagagactgaaccaaccgatcccgcccccttggtagacgctgccatcgggagccgtgaagccaacggtattcggcacccccaccctaccggggtcagtcaccccacccaggaccaggtcgccacgggtttccagacgcatgccagtatctccggccaccagggtgaggccacccgtggagctagccagcgtcgggctgaacgcatccctgctgcgcacttcggcggggtcccgcagtagagtgtcgtagcgaggatcgatgccccccagcgcaccactgtacaagctcgcggaaccgcgcagattgatcagggccccctgcagatcgtgaatggtgccgccgctgtaaagaccgtcaaaacccgaactcgagtaggtctgggtagcccgcgcctcccggctcgggttcacctccccgccaattctcacattcaggtcaccgccgccgccaagttgcagcgcgccgtcggaggtgagccggccagtgccggcaaccgccaagaccagtccctggctgcgcggattaaggttaccggatgaaggtatcgaaccatctccgcgtggcgcgatattgccggcatcgcctccggttcgcatgctgagattgccgcctcccagagtgccgaaaccggtgaagccgaccagatagggagcatctccctccgcgccacgcacatagctgccgaaattgacccaccaggccgtcggcactccttccctgtcggcgctgccctggcgccagagccagttgccgactgcagcgctggggggcaaggggcgaatgggatcgctacttgtcagtttctcggcccattgatcaccaaccacatcaccgccaacggcgatatcgaggttgccgccatgttccggataccaggcctggtactggctggttgagagcacttcgtaatccgcgccaccggcgcccagtaccgacccattgaacagaccgcgaggctgattgaatcccgtcgcgacatcggcggcctgcgttccggcggtatagacgccgtacggcgaccattgcgtaaggttaccggcactggccaggtcaagatcgccagtgccggtgcgcagcacactgaacaactggttctgcggtgtgaccacggttttgccgagattctcgatacacagggacggatcgacactgcaccaccacagatcgccctcgccgatcgccgtaccagcaggcatgcccaggtaattgccgggcgcccaggtccagcggggaggctcggcacaatacggccccagcccgcagatccattcattgctctcgtcgaccggagttcccggggtgatcccccagtcggtagcctgatcggtgaacaccagccctcccgagctctgttcgatcttcgcctgatagtgcgtatcggccaggttcaggctggccgaggagtccggacgcaccagacggttgtcggcagccgcgagatcggcaccggcgaccaggcgcatggaccaggactggctaccggccggcagcatctcggccaatgcccagttgcgtccctggcggacaccgtcgctgggccgcaactcgatgaaaggcgcatcgccagccagtaccacctcggtctgcgaagggatcagagaaccacgtgccaaggccagctctccattgagcagcaggacattgggtctgctgggcccctcgcgcaggatgctcggcaagggcacgcccgcaggccaggtcatcgcctgcacgctggccggtgccgccagcagggtaccggcacccagccggctgccgacctccagcgtcaccccgtcgcgcagcaggctgcccgcggcgtacagcagggtgccggcggcatcgtggatgtccgctaccagcacgctgccggcggccagggtatagggctgctcgagtaccgcctcggtggccagacgggtgccggcggccagggtggtgcccttgatcggcaggtcgtagttgagggtgcggccgccgaggaacgcggtaccgtcgccgagcaccacgcccgggccgggaaccaccaggtcgccaccaaacggctgcactcccggggtgaggatccagcccttgtcgtccggcgagtccggcggcggcgcgaagccgtcgttgatactgccgtagaggttcaggtcaccgccggcgcgcagcaccagcgcgccgacctcgccggaaccgtagacctcggtcagcggcgtgttcggattgaggctggcgtagcggtagccggacagatcgagatcgccctgcaccaccaggtcgccgtccgccgttgcgctgacgatctccacccctggacgcaggtggaaagcatccgcgtaggtggcattggtcagtccggccagcttgccgtcgagcaactcgcggttggccagcgccgcggcgatgaacgcgctgctctcggcatgccgcgcatcgaggtaagcctggtcgatcacctggtagggccgcccgccggccgccggatcgttgccccagggcgcatcgtcgtaacgctgcaccgcgttcagggcgatgctgccggcgccgcggatgtccagcgcgccgctggcatcgatggcgatgtcgccggcgctgaccccgcccaggcgtggcgcgttcaactccaacgtgccacgggcgacgccatcaacctgttccgctggcgccgcggtgccatggcgcaggtcgatgcgcgcgccgccggccaggaccaaggtgccgctgccggaactcagctcgaccatcgcccggttcgggctgtcgatgatctgcccgtagctgtcgcgccgcagcaggctcccatgcgcatccagcagcgcgttgccgcccaggctcaggccgcggccaccggccaggcggatctcgccgacctgcgcgccgctggcgtccaccgttccgctcacgccgagctggccattgtcgagggacacctcgatgcgatgcgccttcaggccgtcgccgatctgcaggtcgccttgcttgagctggaagcgccgcgcgccgaagacctcgccctggttcaggcgctggttcaaggcggtgaactgctcgctcaggctgccgccatcgcccaggcgctgggcgcggatctccagctcgccaccgaggaacggcacgcgggtgccgccggcatcgtagtcgccgctggcgccacccagtatgcggccctgcaggtccaccaccccggcctcctcggccaacgccacggcgctcagggtaccgccgcggttgttgcgcgccgacaggtcgatcagcgaaccggcggcctggcggatgtcgccggcgcgactgctcagcagcaggtcgccaccccagctgtatttatccacatcgttgaagctggccttgcgtccggccagatcgatgcgcgcgccatcgcccagctccaggtcgtcttcggcgctcaggctcagcttgccgctgggtagcgagaccgcgctatccaggcggatctcgcgggcgctgagggacaactcggcaccaagcccggcggtgccgctgtcgaaggtcaccgcggcagcgcccgccggcgccgccaggctgaggctaccgccgctgctgatccgactcagcgagccggcctcgccggtcagcaacggcgtgctcaggcgcaggtcgccgccactgtagcgcaggccttcgccggcgacgtagccgtccaggcgctggtagacccgcaagctgcccttgtggttggcgctgatccgctcgctggcgttcagttgcacctcggcgaagcccagcgccaggcgtgcctcgtcggtctcgccggccggctgggtattcgcgccgtagcccagggtgatgcgctcggcatccacccgcagggttccgctaccgctaccggcgccgccggcgaccggtgccgcggccggctggctggagccgctccagaccaggctggcggtgcgaatgctggcgacatcctcgccggtgccatggccgtagatggccggggtgcccagcaccaggttggccaggctggatttgccggtggccgggtcgtaggtgtcgaggctgacgctaccgtatatgttgaccgcatcgcgggcactgaggatcaggttttccagggccggaatacccgccccgcgctcgccgcgcagcaggcgctggagcaccgtctggtccagcgccaggccgttcggcaacacgccgcgagcggccgcgtcggccagcgactggctggagccgatattgatcgtactcagcgccaggctgagattgcgtgtcccgtaacgaacgttgtcgccaaacgtcaccgtaccattggtggcgatacccagagtgccctccgaatagagttcggtgtcggcgcagcccgccccttccgcacaacctccgagacgaaccggtaacgagctatccgctgcgggtgccagcaggttcagccatccgttggacaagagcagcaggttacggccgccgggttgatagatgaaaccatcggacgaatcgtatgcagtcttgcctttccccagagtgctgatgccactcccgccttcaagggtgatatccctgccaatgatcacctccggtgcggaaaggtgcgcgccctttcgcagcacaacgggaaagagccggttgctcccgccgaactggacgaagtttccttgctcgccgtattcgacgtagggcagcgtgccaatggcgatacggctggcgcctattgcattcagatcgtccgcaaccaacgacacgccagcgaaatcggagtcgggcagcccaccttcaggcagaatctcgatgcccgcctcggcatccacgatgaggctgccgccatatccgctttcttccggcgtgaagtcgaccttcccctcgaagctcagggcgttttcccgaagctcctcatccgcgcgcaatcccaggtagagggatctggcatccactggcaacatcgctctggggatgttcttgcgcgcggcatcggcgcgaatgaaatccgcatagctcatttcgttgtactgcgagtagcggcgcagcgtatcggcggaagacaggatgacctgacggctcagactgtcgcggatggacgtgccggcaatcgacaactgcccggacgtcgcccaggagccattgcgcaacccctgcgtcgccatgggcgcgccttgccccgccagaccgttgatctcgacgcggaaagcgcccggcaacagggcataggtcgaaggcagcaaggtgtaggtaccggcggccaggccgggaacgccatccccgatggtgacctgttgcccgaccaacggctggatggcgcccgcctcgccgcccaatggcgcactaacggcctggtgtccaggcacgatggcatacaccgggttgctggacagctccggcagacggaacccatcattgtcctgctgcaccaggggatgaaaacgcgcatcggtcgaaccccctctgccggagatgaatccagcccccgcgagttcgccgccgccggacaggtccagccgcgcgccctgttgcacatcgacctcgctggcataaaggccgactcccgcaaccagtgtcccagcagcgagggcgcccccggcaccggtcagttgaatggggacctggttgaccagatagttgatcccatcggtcgtgcctccatagggcatgaccagctcagcgccgctaaccgaggtcaggctacccggcaacaaccttaccgtgcccggggcacgatccagattgctgccgaactggatgagccccagcggcgcacgcaccacgccaccctgctcgatattcgatgccatgaacgccagactgccgaataccgacagcggagtgtccggcaaggactcgccgctacgttcgatagccaaatgccgttcggcatcgaagacggcctgccccctctcatccagtccatacccggcatagagggtcgaactcgctcccgtcaccggatagagttgggccgcagtcagttgcagatcgccgtgggttatcaagcgccccgacggatcgccattctctggatagtcgccagcgaaacgcaggtcgccctcgctgcgcagcgttaccttctcgaaacctggtcgctgatagcggacagcctctgcgttgaccccattgatcaccccgtcgctaccgaatgacaagcgcccggcgatatccagcaggcgcccggcagaaacctgcaagcgaacctgctccgctgtcgcggtcggcccgtacgtgagacgcggacgaaactcgccagaggcctgctgcccatacatcccgatgccggaaaggcggacatagggcgcctgcaacttcacctcgctcggcccaccacctgtggcggctatcgtccccgcgtacagattcaggctgcgccccatcgcaagatcgatgttcccctcgaacgacagcggaccgttgctgaacaacgaaagttggtcgaatccgccgcccgtcagcgactgcgtcccaactcggctctggccatagcgcagagccgaatcgtccattcccggttgcagcaaggtcggtaatcccgaatcggcatgccctgccgtcaggatcagctcgcgcatggccaatacccggtcatccacgacagtaaaaccttggtacaggggagcgtccgcaatgatctccaggctgccgcccgccgctcccgagccgccggctgcggcgcgcaacgaaccgtcaagatacagcccattgtaggaactgagagcgatgcgcccgccgtcgccggtcagcaaaacccttcccagtcccggtacatccagctgtgcctggctgccggaggcctccagtcgtgcaccggggcgtacgatgacgaacgcatccgccgaggtcgcgatcgccttgcccggatcgatctcgccgccgatgacgatgctgccgccggactgtacttctccatagcggcgaccgcgcccatccacggcagtgacagcgcggccggcaacatccagcaatgcctgctctccaatccagatggagcgtgcatggggctggccttgcgccttgggctgattgtcctgggtaacgtcgagcgcgccgaactgctgctggcgcacgtcgatgcgtccgccccaagcgttcagagtgccatccaaggtgatctgtccgggaccgcgcaggacgatggcgcgccccggatcgacctcgaccagcgaaccgcgccccagctccagcgtctggctggcgggatcgagctgcccgaggatattgccgtcgccgcctgcctgcaggtacaggtccgccccttcgcgttggaccaagcgtccggccaaggcatcctctaggtacagcggcggtatccaggcctccagcgcctctcgcggcgcctcgccagccgcgacctcgccggccccgctggcgaaacggtagaccggccgcgcgacccgcacctgggcatcctcggctaccgtcaatccggagcgaccgaccacccggtagctggcgaagccctgctggaagaaatcttcggccagttgcaggctgccatccccgaggtcgtcgccgccgatccgcaccttgccgctctgcagcgacagcgtgccggcgccactcgtgccgagaccattcaatgtgccgcccaactgcaattggccatcgctggcctgcgccagcccggcactggcgtgcaaggcgatgtcgccgccgcgtccgcccagtcgcttgccgtcggccagcagcgccgccccggacgacacgtcgagcagactgccctgtcccaggctcaggtcgccgccgctgcgcagggaaatccgtccgccgtcgcggtaggccaacgtatcgttgtcctccggcgccagcagcaggttgctccacaagccgctggcatccagtcgtacaccatcgcccacgcgcaagatgccggcttcgcggccggcatcgacgaaaccatcgatcgtcccgttcggggaaatctgcgccagtacgttgccggcctgcaggctgccgccatgagcggtgatgtcggcgtcgatcgccacgtcgttggcgaacaggatcgcctcgccgccattggccagggtcagcgcgctgtcgacgcggatgctctcgccggccgccaccttcaggccgcccagctggaagccgttgagcagttcgctgtccaggctcaggcggccctggcgctcggcggccaccggagcgtccagggtcggctcctcggccgccacctcgccggtaccgatgaccacctgcttgaggctgccggcatcggcgccgagagcgtactccagcaggccgctgctcttcacgtagtagggggtgtagcgcccgacgaccagctgcgcgccgcgcgccacggcattctgcgactggttgtagccgtccaggccggcctgtggcgcttcggtctgccgctcgccgcgataggtatcgccgaccacctggccgtcgagccgcgcattggcgctgccgatcaccagactgccggcgtcgcggccaacgctgtagccgttctcgtagcgctgggtcggcgcgatcagcggattgtagaaataacgggtctggtcccagcgctcgctgtgtgcctcgtagccgcggtagatgccgtcgtagagcaggtcacccggcgccgagccgagttcgtagaggcgtccgtccgagcccttcagccaggtctggcggatgtagccgccctgcacatcgagggttccgccggacaggttgatctgtgaaccggcctgggtcaccacgtcgttgccggtgaaactgacgatgccgccctgggccatccactcgcccgccgagtggccctgggtgcccaggtagccaccgacctccagcaggccgccagcggtgtaccagcggtcgctggcatagccgttggtgccggcaggcacccgtaccaggtcgcgcacgtcgacccacacgtcctggctgttcagaccgccgccctcgcggttgaccgaggcgtcgcgctgctcgttgccgcgcacgttgaccttgatgctgttggtctccatcgccacctgcacgccttgcgcgccggagacatcgatcaccgcgccgtcgcgcagcagcgcgcgctggccagcgttgaccgccacctggccaccgctggcgagggtgatggagccgtcgcggaaatcgacgctgccggcggagtcgatctccacccgcgacaggtcgcggcggtcgtcgtcgccccgactgacggcggcactggagccgttcaacggcttgagcaaggcctcgcgctggctgtcgagggcggcgctgccgctgctatccaccaggatggcgctggtggcgccttcggccagggtgatccgctcgctggccttcaggtgcagggtgccgcggctgtccaccgaactgctggaaagcaatacgccggcctgctccacctcgcggccgctgaggctgatatcgccggtggcggcctgcaccaggccgctgttgcgcacccggccggcactgctgtcggcggcgaagcccggcagcacctcgttaccgcgggtggtggaggtcaggttgccgtcggtgccctggccacggcggatgacgaagctgtcgccggcggacaggaccgtctgccccttcggtgtgacgatgctgccggcgttgtccacctcgctgccgagcagcaggacgtagccgccgcccctggtcgagccggacggcgctgccgtacgcaactgtgccccctgctccacgcgcacggcgccggccgcgtcggtgaaggtcggacggctgccggcgttgtcgtagtagaggccgcgctgacggaactgttcgtccgagatgttcgccgccgccaccgtcagattgcgcacgtccacctggctgctgccggaaaacaccacgccgttgcggttgaccagcatcaccgtgccgtcggccttgatctgcccctggatctggctgggccgcgcgctggggtcgttgacccggttgagcagcgcccagtcggcgtgctgctggaagtccacggtggtgttgcggccgacgttgaaggtctcccagttgagcaccgccttgtcggcggtctgctcgatgctcaccgtggtcttgccggcggcctgggtctgcaccggtcccttggcgttctgccaggcctgctcgaacggcagcgaggcgtcgaccttgaggccgccctcgccgagcccgtccggaacatcctgcgggaggttcagcgccgcctggcgtccggcggcctgggcggcctgctgggcggcaatggcggcgacggtgttgttcaggttggccatcgaacgctgcaactgctggttgacccgctgctgctgcgccagcggcggcggcgcccccggcaactgcgctcccggtcgcggcgccccggcagcgccgccctgagccgcgcccttggcggcgaaccaggcggcgctgaacggctgcccggcggcctgggcgccccctgcgaccagcagcagggcgatggcctgggccagcggcttcaggcgcggcgcgtaaagcgcgcgggaggaacgggcggacgacggcgaacgggacggcatggcgaaggggtccttgagcatgaagtcggtcgggcgcccgcaacgacgcccgttactggtagacggcctggcggagggtgggccgaagacttgtcatggaaagttcatggagcggagcgaggagcctgggcgaacggaaacacgacggcagccggatttcagccaccgtcatgacaggtcactcatggacgccctttgccgttgcagacggagggattgttgatcgcgaggttttcgctggtaccagtgatgaaggcgctcatgatggcgctcttccaggaagcgaccaggggtacgaaacggtggtcagctaccgctctatttgtagtggtgccgccataatgctgggtaaggaaggcacgcaggtcggcggcaacagtggcatccttgtagcactggccaaagacaaagttggtatagccgacgatggagtagcctgcgttcgggttgacgaagaccggtatccacttgctcggatcggcgcgatctgcagcgccccccggcggagccacgctacgaacagcgatcacgcgattggctagagtagggagcaagccattcactcgcgcgatctttgaattgtcgctcaggtccacaccatcaggcccctcatagccgatcgagcctgacacattgtcgacggcattcctgacactttcataaggctgtactgccacccagttgctcggcagcgcaccgccggccggcagacgggcgttcgtgaagatcgagttggtggcgaagcgagtcgggcagaccgagttcaggtggcgggtcagcaactcggtggctccactgccgccccgctggtagacgatacgaatcggcgtacggtcggcggggttccccaatagttgcccccaagtgaccttggcgccggaaaaggcatcgcagagctgggcactggtcaggttcaggtcggtaatgtcgggcttcttgtaaggaatggttactgcggtacccgccaatggaatctggatcagtggaccatatgcgcctctatagttggttgaataggcgctcagttcgctgctactcaagatcgagtcactaccaatgtagtggacggtgccggtagtagcgccaagcagcatggggttattcatcaggaaagcggtcttgccaatgccgctgccgcttgcggcatagctgaagttgattggcaggatgctgtcggcagaacctttgtacaacttggccggcatggaagcaccaccgccggtcaccgtagcgcccagcgttgtatgactggtcaagagcgtcagagcaacgacgccaaacattggcttgagcatgaaaacctcctgggttccccacaagaaaaaagaccggcagccataaggctgccggtcctcgtatcgattcgcctaggcgaagcgcttacgggcggcctttggtgttgcagacgttggtgttgccgatggccaggttttcgctggtgccggtgtagaaggcgctcacgatggcgctcttccaggccggagtcagcgggatgaagccatgggcggcaactgcggcgttggtggtagtgccaccgtagtgcttgttgatgaaggcgcggacgtcggtggaaacgctggcgtccttgtagcactggccgaagacgaagttggtgtaaccgacgatggagtagccggcgctcggattggtgaacaccggaacccacttgctggggtccgcacggtcggcggcgttggccggcggagccacgctgcccagggcagtggaaacgttagcctgggtcggcaggttgccgttcacacgggaaacctcggcgttgctgttgatgttcaccgcatccgggctgacatagccgagggagccgttggttgccttgacggtcgacaccacggtggaagtggcggcgacgccaacccagttgctcggcaacgtaccgccggccggcagacgggcgttggtaaaggtcgagttggtggcgaagcgagtcgggcagatcgagttcaggtggcgggtgaacagttcggtggtgccgctgctaccggtgcggtagacgatgcggatcggcgtgctgtcggtagtgcccagcagttgaccccaggtggtcttggcgccggagaaggcgtcgcagagttgggcgctggtcaggttgagcgtggtgttgccgtccttgcgatagggcacggtgaccgaggtggctaccgacgggatctggatcagcggaccgtaggtgccgttgtagttgctgttgtaggtggtcagttcgctaccgctgaggaccgagtcgctaccggcatagtgaacggtaccggtggtgccgaacagcgaggagttgttggtcaggaaagcgttcttgccggtgccgctgccggtcacggcatagctgaagttggccggcaggatgctgtcggcggagcctttgtacagctcggccggcaaggaagcgccaccgccggtgacggccatggcttgggcggatacgagggcggccacgctcagcgaggcagcgatcagagagcgcttgaacatgaagaatctcctttcatcgtggtgttggtacgttgaggaagtcgtcttgcatgaggcggcgccgtgcttgccgggctttgcatccctagccggtcgaaggggccgctggggataaaactcgcaagttccggtgacagatcggggaaaaaatctcgggagcatcgaattgttttcgcagcctttcctcgggtgttcgcaggctctgcgccgggccttttcgcgggacctgcgaggttccgcgagcgcctcccggcggccggcccgcgacggccatggcgcgccctcggggcaacctcgctgaaacatgcacccgagccctggcgagaggccacacgggttgatgacagcgagaggaaggcctgcttgcacaggcccctcccgtagggcggattacgccagcggcgttatccgccgatacctctcttcggaagactgctgagacgccccatccccacggcggatagccgcgagcggttaatcgcccagcacgggaagggcttgttcaggcacggactactggaccagttggttcatctcgatgatcggcatcagcaccgccatcacgatggtcagcaccaccccgcccatgaccacgatcatcagcggctcgagcaacgcggtcatgcccatggcgcggcgctcgatgtcgcgcgacagggtctgcgccgcgcggtcgagcatcggcggcagcgcaccggtcttctcgccgctggcgatcaggtgggtgaggatcggcgggaacacctgccgcgtgcgcagcgccgaggccagcgagacaccttcgcgaacctgcgcggtggcctcctccaccgcctgcgcgaggcagtcgttggccagcgtctggcgcgccgcatcgagcgcgcgcagcagcggtacgccagcgctgccgaggatcgccagggtggaggcgaagcgcgcggtattcaccccgagcacgaagcgtccgagcagaggcaggcgcagcactcgccggtgccagccgagccgcgcctgcgggtcgcgcaggtacaagcgccagccccagtaagcgccaccgatggcgccggcgcagagccagccccaggcgcgcacgaagtcgctggcctggagcatcgcccgggtcagcgccggcaggtcctggcgcgcctgggagaaggcgctgaccacctgcggcaccacgtagccgaggaggaaaatgacgatgccgatggagaccacgccgaccaccgccgggtagatgaacgcggtgaggatcttgccgcgcagggcgttgcgttcctcgatgtagtcagccaggcgctccatcacctgggccaggtcgccggactcctcgcccgccgccaccagcgcccggtagatttccgggaagtcccgcggccgtgcggcaagggcgtcggccaggcgcatgccgccgcgcacgtcgctgcgcacggcgctcagggtctgggcgatgtgcttgcgctcggcctggtcgagggtggcgctcagcgccgcctccagcggcaggctggcggccagcaggctggccagctggcgggtggcccaggccaggtcgccgtcggacaggcgcggggcgaacagcgcgcccgccccttgcccggtcccgccgccagcctgctcgcggacctccagcggggtcaggccgcgggcgcgcagttggccgagggcgccacgctggctgtccgcctccagggtgccggtctcgatccggccctgggcgtcggcggcttcgtagcggaaggtctgcatcaggcgtcccgggtcacgcggaggatttcctccagggtggtggagccgctggcgatccagcgctcgccgtcctcgcgcatgctgcgcatgccggccgcgcgggcggcttcgcggagatcctgctcggcgcggccctggtggaccaggcggcggatctcgtcgtcgatcacgaacagttcgtggatgccggtgcgcccgctgtagccggtctggttgcaagccgggcagccgaccgcgcgccagccgccgtcctcttcgacccggcaatgcgtgcacaggcgccgcaccaggcgctgggcgagtacgccaagcatcgacgaggcgagcaggaacggctcgacccccatgtccaccagccgcgtcactgccgacaccgcgtcgttggtgtgcagcgtggccagcaccaggtgcccggtgagcgaagcctgcacggcgatctgcgcggtctccaggtcgcggatctcgccgatcatgatgatgtccgggtcctgccggaggatcgcccgcagggctacggcgaaggtcatgtcgatgcgcgcgttgacctggatctggctgatccccggcaggtcgtactccaccgggtcctcgacggtgaggatgttgctggtgctggcgtcgagccgcgccagggcggcgtagagggtggtggtcttgccgctgccggtgggcccggtgaccagcacgatgccgtgcggctggcggatcaggttgtccagcggcgccagcacgccgggagccatgcccagggtctccagcctcaggcgtccggcctgcttgtccagcaggcgcatcaccacccgttcgccgtggccggtgggcacggtggagacgcgaatgtcgatcggccgcccggctacccgcaaggcgatgcggccgtcctggggcaggcgtttctcggcgatatccagctgcgccatgatcttgatccgcgacaccagcgccgcgtgcagcgccttgcgcggcgcgaccacgtcgcgcagggcgccgtcgacccggtagcgcaccaccgaatgggtctcgaagggctcgatgtggatgtcgctggcctcgtcgcgcgcggcctgggtcagcagcgcgttgatcatgcggatcactggcgcgccatcctgggtgtcgagcaggtcggtgacctcggggatatcgtccatcaggcggtcgaggtcgacctcgctctccgccgcgccgaccaccgccgcggcgctgccggtatcggagtaggcgctggccagcagggtgtcgagttcgtcgtcgcggacgctctccaggctggccagcgcatgccgctggcgcacctcgctgatcgcccagccgggcgtgcgcgggctgaccagcagggtcgcgccatgctcgcccggccgcagcaaggcgcgctgcgccttggcccaggcgtagggcagcaggctcatagcggcgccgcctcgcccaacggtaccgcgcgcagcggccgcgggctcgggcgcaagtcgtaggcggcctgcgggatgccctgctgcgccggcggcagcaccggagcctgcatgtcgccgacgctccagtcgtggcgcggctgcacgcgctgctgggcgcggcggatgaagtcgtagcggttgagggtgatgctgcggccggcggcggcgtcgcggacgatgtagggacgcaggaagaccatcaggttggtcttggtccgcgagcgcttctggtagcggaacagcgagccgacgccggggaggctggagagtccgggaacgccgtcggtgttgtcctgcacgttgtcctgcaacaggccgccgaggaccatgatctggccgtcgtcgaggaggatgctggtatcgatcgcgcgcttgttggtgaccaccccggcggcggtgctggcgcgctcgtcgacgctgctgacctcctggtagacgtcgagcttgaccgttcctccctcggagatctgcggacggatgttcagcttcaggccgacgtcctcgcgctggatggtctggaacgggttgttgctggtaccgccgccgtcggtgacgtactggccgctgacgaagggtatggtctggccgaccatgatgctcgccgactcgttgtccagggtcagcaggttcggggtcgacaggacgttggtgccgccgcggctcttcagcgcccgggcgagcaccttgaggtcgaggatcttgccgatcccggggatgtccacggtgccatccaccaggccgatgttgagccccttgggcaacacgtcgatggtgttcttgccggccgtgttcagcgccgactggccgaagttgaccccgccgaacacgccgttgccgccgaggttgccggcctgccactggatgccgaactcgctggagtcgtcttcgctgacctcgacgatcaggctttcgatcaccacctgggcgcggcgctggtcgagcaggtcgatgacttcgcggaggttgcggtacaacggctcgggtgcggaaatcagcagggtgttggtggtggcgtcggcctgtacggtgaccccgccggcggagaacgccgagttctcctcgcccatcgcaccgggtccggcgccgccctggccgctgcccatcgcaccataggcgccgccgctgcggttgctgccgcccaacccgctggaaccgctgcccgtggtattgccgctgctccccaggccctggctaccagtaccgctattgccgccaccgagcatgccgccgccgctcaggcgcgcgcgctgctggtcgccctcgttgccctcgccgccgctgtcgccggtgatcagcccgcgcagggcctgggccaggcgggtcgcctgggcgttgcgcaagtagaccacatggaggttgccgggattgctttgcacgctgtccagcttgccgatcaggtcgcgcgccaattgcgtgcgctctgggctcggcgagcggatcacgatgctgttggagcgtgggtcggcgagcaccacggtcttctggccctgctcggcgccgccgctgccctggctgtcgagcagttcggagacggtgctggcgatgtccaccgcgatgccgttctggatcggtaccacgtcggtgtcgctggcgctgggggtgtcgatgctggcgatgatcccggcgacccggtcgaggttttccgcgtagtcggtgaccaccacggtgttgttccccggataggcattgatcgggttgttctgcgcgacgatcgggcgcagtaccgggatcaggttcaccgcgttctcgtagcgcaggcggaaggtccgcgtgaccatgccgttggccgccggccggtcggcgccgtagaccggcccgccgagcagcttggcgtcggcctccggcaccacctggctgaccccgtcgacgtcgaccacgctgaagccctgcatgcgcagggcgctggtgagcatgcggtaggcggtgcgcgccggcacctggccttcggaaaccagggtcagcttgcccttcacccgcgggtcgaccaggaactgccggccggtggcgcgcgacagcgcgcgcaccaccgcttccacctcggtatcgacgaaattcaggctgaccggctgctcgccgagttcggccgctgtcgctgagaccggagccacgccaccggagcgcgccacgccgcgtccggcactcagcgcgcggcgggcctgctcggcctggggccgctcgcggacgtcggcgctgcgcaacggcgcaccggagcggacactgctcagcggccggccgacttcctcgtcggccgggggcacgccggggaccttcggcgtctcgctacacgccgcgaccagcagcgcgcccagcgccacgcccagtacaggccaacgacgccgggcatggtggaaagctgattgcctcatggggaatccttgggagcggaagacgactgcaaatggatcgaggcggacaccagcccgccggacggctcgctcgaagagccagagcgctcctcggaaggagcgtcaagacgcgtcacctgcgcctcgctgacgctcaggcgcaacgccgccgggctgcgcgccagccagcgcagcaaggcctcgccggacacgctggcgaagtccagttgccattggcccggttgcggggcgtccagttggaaaccgtcgagtccctgatcgcgcaggctgcgacggatcgcctcggcgtccgccgtaccgctcagggtcggaccgcgcaacgcctcgacctcgcgcaacacgccgtccaccgccgcggcctgcgcacgcaggcgcggcagctcggcttgccaatgctcgatccgcgccagcggcggatcgatgaacacttgccaggtcagcgccaggcatagcgccaggccaccgccggcgagaatcttgcgctcgcgcggcgccagttgccgccagtaggcctgcagccgcagcagcaggggactccagcgctgcgccggggtattcagtaggcccgccaggcgcttattcatcttcatcggcagccgcctcggcagtgccactgtctgccgcgccagcggccggcgctggcggcgcttccatggcgcgcacctgccagcccttgtcggaggcatcggcctgcaacccgtgcttgcccaactcgccctgccaggcagcggcatcgccgcctggcggtcccggcagcagctccaggtccagttcgccggcgtggtagtccagtcgttgcaggcgcccggcgaggaacggcatcgcctcgccggcgccatgcagcagcgcggccagccccggtacggcatcgccatcggccttgccggccagataggcgtcgcgtcgctcgcgagcctggcgcagcggatcgagcaccaccggcagttccgggaaggcctgctgcacgcgttgactgctctgccgttgcaaggactggccctgcccggccagttgcccggcgtacaggttcagaccggcgacccacaccagcaaggccagggcagcgcagatcaggggcatcttccaggtgccgttgccggcgctcgtcgccggcgctttcagcgccaatccccacggactggcaggcccgctccagcgcagcgcttcgtccagcgcctcggcccgctccagggctgcggagcgccacgccggtcgctcgcccagccagaacagtcgcaactcctgcgggacctcagcgaggccctgctccggcaagggatggaccgcagcgtcgctcagcgagcggcgcaacagcagatggccgtcccactcgccggccacccaaccgtcatcgcgcaacggcaggaggaacggcgcggcctgcacctcccgcacgtcgagccgcagccgctgcacggcctgctccagcgaggccagcgccgacgcctccaaccaccccaaggtcaggcgcccgtcggcgccgcgcgggccgtgggccaggcgtagctgcgccggatcgccgaggaccagcgcctcggccgcgcagttcaccgcggcggcgagcttcgccgcaggcagcgccggcagttcgagactgaccaggcggcaatcgcgcggatgcaggaacagcgccaccggcaacccctggcgtcgccgcgccagttccgcgagcgaggcctcgattcgttcctgcaccgcgccgcgcgcatccaggcgcaggcaatgcagcggcgccgcctcggcgaactcgctcagcggcggcagcaggcaacgccaggtggctttcatgagcccaccctcacccagttgaccgccgtgctttcaccggccttgcgctgcaccagggcttgcaggcgcacctcttgccggtcgcgccgagcataggcggtgagcaggaaccagtcgctggtgatcccgaccttcaccgactgcgcctgcaattgcggcatgttcaggcggttgacgaagtcgccgcgattgaggaaccagcggccccggtcgcgctcgccgagcacccgccgcgcctggtccagcccgaggccggggacacaggcggcgagcacttcggcgcgcgcggtgttgccgttgatccaggtggtttcgggcaggatggtgacgtagggccgcaggcgttccagggtcgccggcggaatgcccagccgggccaggtcgtcgagacgcctgagcgccggcatgcgcgccggaagcgcacgcaacacggcgcccggcgaagtctcgcggccgctgtcgaagcctgcgggttgcgtctcggccggcggcgcttcggcgggcagccgtgcataggaatcgagtacccgctcgacgatcagccgcgtctccttcgggcgcacgccgagcagaccggcgaggcgttcgaagttcgctcgctcctggagatcggggcgctggtcgaccaacaggttgcgcaggttgaacttgccctgctcgtcttccagttggccgttgaacggcaattcggcgctgctcagacgcaagccacgcatcggttgcgcccagcgctggtcgaggcgggtcagcgggtcgcggcggctgtcctcgagcagcaactggcggctccattccaggccgccgcgcagcatccagccggcctggatgcgtagctgctcgctttccagggcgcggatgaatgcgctctggcgggcgatcaggccggcggctatgaccgcaaccacggtgacgatcagcagcgcgctgatgatcgccatgccgcgctggcgatgaccgttcatggcgcgctcagagctgccaggagccgatgtcggcgttgatgccctcgccgcccggctgcccgtcggcgccgagggagaacacgtcgatctcgccgttcacgccgggattcaggtactggtagggcttgccccagggatcgttgggcaggcgctccaggtacgagcgccagttgctcgccgaggcatcggcagggcgctccgcgagcaccttcaagccctgcgcctggctcggatagcggccctggtcgaggcggtagagcttgagcgcctgcatcagcccggagatgtcctggcgcgccgcggtggcgcgggcctggtcgggacggtcgagcaccttgggcaccaccatcgcggcgaggatgccgaggatcaccaccaccaccatgatctcgatcagggtgaagccccgctgtccccgatgtcctttcgggctggagctgaactgcacgacatccatctcgacactcctcggcatggttcgattcgccgcggattgtttcaggaagatatgtcaacgatattgaaaatcctcgggtgcgccgctcttccggaggcgcccgcaaggccctggagccgggctttccggcaggcgccggggatggctcgcgggggcgccctcccgagcttttgtcagggatcggtcagatttcccggctagcctggaagtcccctttcgccgacctttccgcgatgtccacgcgcctgtcttcccgcggtttcaccctgatcgaagtgctggtcgcgctggccatcgtcgccatcgccctggccgcggcgatccgcgcggtgggcctgatgaccgacggcaatggtctgttgcgcgacaagtcgctggccctgctggcagcggagagccggctcgccgagctacgcctgggcgtcggcgcggctccgggaaacagcgatttcgaatgctcccagggccgcctgcggttgtactgcgaacaacgcgtcgaggccaccgacgaccccgcgctactgtgggtggaaatccgtgtgcgcacgcagcgcgaacaggcggtgccgctggcgcgcctgaacaccctgctgagccgctcccggtgatctcaaccgcgcttgagggtagccagcggcggcggttcggcgagccgctgcatggccacccggcgaacctcgccgttctgctcgatgagcaccgcgtcggcctcgatccgccgcaccttcgccgcacgtgccaggacctcgccctcgcgataggcctgggccggcgcgccgttcaccgagaggatggcgatcgccgcgggaccaccgctgatcaatcccgccagttgcacctcgacctcactggaaggcgtcgcgaaccagcgttgagcggcgtcctcgccgctgggcggcggaacgtcggcgacatcggcctggaccacgccgggaatcggcgccagcaacagatagccccagaacagcaggccggcgaggatcgccagcacggcggcgaactggaccaggcggggcggatcgatacggggcatggccggcatggcgggctctcctggcgtatgggcgacgggcgccacgaacggcgccccggcaccagcctagcgcggaattctctccgttatgtttcacacgccgatcatcttcgtcgggcactctggaaacctctctcttcgcggagcggcatccggtgaggcgaccccggcaaggcggtttcaccctgatcgaactgatggtggtgctggtaatcgtcggcatcgccacggcggccatcagcctgagcgcccgccccgacccgacgggcctgctgcgccaggatgccgcgcgcctggcgcggttgctggaaatagcccagggcgaagcgcgggtacgcggtacgccgatcctctggcagcccagcgccaagggctatcgcttcagcccgcaggcctatcgcggcaagaccgacgccttcgccgccgacaccgaattgcgcgcgcgcgactggcaggccgcgcctctgcgggtcagcgtgcgcccgccgcgaccggtgttgctggacgccgaatggatcggcgcgccgttgcggataacgctctccgacggccaacacagcgtcaccgtgctgcgcgaggcgaacggccatgtccgggtacgctgaacgcgcgacgacgcggcgccggcaagccggcttcaccctgatcgaggtgatggtcgcgatcatgctcatggccatcgtcagcctgatggcctggcgcggcctggacagcatcgcccgggccagcgcgcacctggaggacagcaccgagcagggcgccgcgctactgcgcgcgctgaaccaactggagcgcgacatcgccctgcacagcgccatccgggaggagaccggcctgcccagcggcgacgagccgatccgggccggcgacagcctgccgcccggactcgcactgaagcgcctgagcgagatcccattgcgcctggacatcgtccgcgccagtaccgagccaggcgcgccgctgcagcgcgtgcgctggtggcgacagggcaaggtcctctaccgcgccgcctcgcccagcggcgaccgcctgccgttgccgccgctggcggagcgggtggctgtgctggacgacgtgagtcggttcgagatccgtgcctgggtgccgggaaagggctggacgcgcctgccggcacgcagcaaagtccgcgccagcggactggagatcagcctggcgcgggtcacccgcaacggcgtggagcgctatcgacgggtggtggccctgcaatgaagcggtggctcagccgagcagcaccaccccgcccggcaggcgggtgacctcgatgccataggcatcgcggatcagggtcgccacgtcggccagttgatcgaggctgaaacgggcctggacccggcgtcggccaagggccttgtccagcagcaggagcatgccgggacggtagcggttgatttcgtcgatcaccgtggccaacggtacgtcgttgaacaccagcatgcgctcgcgccaggccatcacctcggcaacgtcgaaaggcaccggcggaccgttgcgtcgctcgtcgaaggtcagctgctggccggcctggaggtccaggcgctggccgaggtgttcgagccgcacgctgccctccaggcaggtcaccacgcaaacgtcaccgctgctgcgcacgttgaagcgggcccggctggcgctcagccaggcgctcccggccatcacccgcaggctgctctgcggcgggtggctggcgatgatctcggcctcgccgccgagcagttcgatggtttcctgctgctcttgattgcgccgcacgttcaggcgggtgcgggtgttcatctcgatccgcgtctcgccgctcacctgcacctggcgctgctcgccgaccgccgtgacgtagtcggcgccgcccaggccatggtcgagcagcgacgggcgcaagacgaacaacgccaccgaggcggccagcgcaccgccgacgaaccagcgacgaccgaaacgcctcggcgcgatctgcgccacggccggcgactccagcggcagagcggcggcactgccgagtgcctgccagagatcgcgcgcctcgacgaacgctcgcaggtgttgcgggctgcgcgcacaccactggcggaaggcccgcgcgtcgccctgggtgacgcgtccggaggtcaggctgatcacccaggcgtgcgcttcgtggcgaaggtcgccggtttcatcggcggcggagtctgaggctgtcatgactgtgctgtacggacaccggaatggctcatgggagggatatggcggcggttttccacctgcttatgcttatgacggttttccggccccgggaccgaacctctggatgacttttctttccaggcgctccgcgcagaaccacagggcggccttgagttccttctccacggtgcgcgtggaaatgccgaagcgacgggagatttccgcatgcggcgtctcctccaggcgcgaggcgatgagaatctgccgacgccgcgccggcagttcgcagagcgcctccagcaggcgacggatctcggcgtgaccgccgacgatgcgctccgggtcgaggccttcgtcggccacctgcaacagctccgccacctcctccccggtgagcaggcgggcgtcgccctcgcggcggtcggcggcaatgttcagggcaatacggaacaggtaggcctggggcttcttgacctccagggcatcatccagccggtcgactctcaggtaggtttcgtgcagcacgtcgcacgccaggtcctcggagcccaggcgccgtttcaggcgtgccttgaagtcgtcgtaggaggcgaggaacagcttcaccatcgcgctttgccgcgaatcgctcatgaccctcccactccctccgtcagcttgcattccatggccttgcccgtcgtcttcggcagcaacaggatggtcagcggctgggccagcgtagcgggcgtcgcctgcatcacccgcacgccgcgcaggctttccaccagggcgctgtcccgctgcgggtcgccggtcgaaccgagcaggcgactgtggcgaacctcgccgaagcgaccgatccagagttgcagcaccgcgcgataggtacccggacgagtgcgcggcgagcggcacaactgttcttccagcgccgcctggaccgctcccgcgtagcgccgatccagcggctgctcgaccttcggcatctctgccggcagcggcgcagcgttcctgacggcctgcgccggcagcagggtgaacgcttcctggctggtgtagcgcgccatcaggccggttccgccgagcagtcgggtcagggcgtcgctggcggtgaagcgcccctgcaagcgggccgagcgccgtccacgggccagttcgccatccaccagaaccgccattcccgtcaccccgctgtaggtcaccagcgccgatgccaggctctgcggaggaatatcgaacgcgtgcaccgccaggcgcaacggcggcctgccgccatcgcccggcacggcgccggacgccggcagcagcatgccgagaccgagcaacgacactgcgcacgaccttgccaccccgaggatcgacatcaacggattccagtccgaactacccggttcaggccagatggccatcacccaggagggacatcctgatggcactgtgtgactgtggtgtgacggtacctgcggtgacatgttttcaccgattgccgtataagcgggaaaccaccatcccagcgcgggagaatcgccatgcaccgttcatcgcaggttctgccggccctgatcctgggcctggccatgaacgccaccctggccgacgagccgacgccgccggcgaactgcatcaacaccgaggtcaacggctaccaggctttgtcctatgaatgcctgagccagcagatggccgatcctgacagcgcggccagggcccgccgcgaacaggagctggattccgccgccatcgtccggcgtccgccaaaccagctcggcctgtacaaccaatcggcgacgcgcattcgcctgggcacctcgttcggcaactcagtggaagcgcagcggccgcctcgctaagggcctccgcaggtccgcgttcctggccggcggcgcaagacagaaaaccccggcaaccaggccggggcaatcgtcgtcggcgaggttggccgccgatcaaaggacaaggaacgcccctcaggcgaaggtacgctccagcagggcgccgaaacgattgaaggcatcgctggcgcccttggcggccaggcgctcttcctcctcgttcagctcgatgccgtcgaggatcgccacgaagctcttccagccttgcgcgcggccgccttccggctcggccagatggcgggcgccgaagttctcgtcgagttcgagcgcggcggcttttttgaacaggaacgcagcgcccagcttcgaaccttcggaaacgaacagccagcccagtgcctcggccaggctcaggtcggcctcgcgcacgctctggtcgccctccggcaccggatggccgaggtccgccaggtctgcacgagcggcgtcgtcgcgggcgcgggaagccaggccggggaacaggcgggccagcgcttcgttgcgataaagcggctccaggtcatgctggaagaggtactgggcggcgacgaagcgggcgaaattgtcccggctggcgaagggttccttgctcttcaccaggctctccaggcgctggtgcggctcgttggtcagcaggttgaggcgttgcgaacgcaggttttgccgagtggattcaggggccagggtatccataggggaattcctttcgagggacggaacgcactgggccgacatagcgtgcccaggatcaataacgattctcaattatattcgttattgaatctcaatgtcacaggaaaggatgccgaccgactgccattgaccagaaaaggactacagcaaatactgtatttacatacagtattcgagttatttccttggcctccctttcatccgtagccgacatcaccccacccgcagccgtcgccggacgaggcaatggcatagcgctgagtgcgctgctcgacgcacgtaggatctggaaaggccagtccgccgtgccggccggcgcttccctgcccaccgggcatgcgcgcctggacgcactgctacccggcggcggttggccggagcatgccctgagcgaaatcctccatgcccgcgacggtgtcggcgaactgcaactactgatgccgaccctcgctcgcctgacccaggcgcaacgtcgcgtcgtactggtcggcgcaccctacgtaccctatccgcaggcctggctggccgccgcggtcgacctgcgccacctggtcctcttgcaggccagcggacgcgacgccttgtgggctgccgaacagtgcctgcgctcgggcagttgcgccgctgtgctgtgctggccgcagcaggccgacgaccgcgccctgcgccgcctccaggtcgccgccgaaagcggccaggccctgggtttcgcctatcgtcccctgcgcgaagcggtcaacccttcgccggcagcgctacgcctgtgcatcgaaacccgccccccacgcctgcgcatcctcaagtgccggggcggcctcgcgccggcgaccgtcctgccagccagcgcctggcaatgaggcggccatgctctgggcttgcattctcctgccgcaactggccatagacagcgcgctgcgtcaacggaacaatcccgacgcaccgctggcgctgctcggcggcccagcgcagcgccggcagttgcaggcggtcaacccagcggcacgcgcgctcggcctgaggcccggtcaatcgctgatcgccgcccaggccctgagccgggacttcgccacggcggaatacgacctcgccgccgtggagcgctggcaggccttcctcgccgcctgggcctacggtttcagctcgcaggtcagcctgcactatccgcgcgcgctgctgctggaagtgcagtccagccttgccctgttcggcccctggccacgcttcgaggcccgcttgcgcaaggaactcacggcgctgggcttccgccatcgcctgtgcctggcgccgaacccggtggcggcgagggtcctggcgaacagccacgacggcctggccatcgaggacgagacagcgctgcaacgccagttgtccgcccttccgctggaccgcctgggactctcgcgggagctggccgtcgccctcggacgcatgggactgcgctatctgcgccaggtcctcgagttgccgcgcgccgccctggcccgtcgcttcccggccgaactgctgttgcacatcgaccgcctctgcggccgcagcccactggcgctggagcactaccggccgccggacaccttcgacctgcgcatcgaactcaatttcgacgtggaatcgcaccaggccctgctcttccccctgcgacggctgagcgccgatctcgccgcctttctcgccggacgcgacagcggcgtgcagcgcttcaccctgcatctggagcatcacgggcgcgccgacagccaggtcacggtcggcctgctcagcgccgaacgcgaggcggccatgctcttcgaactgacccgcggccgtctcgaacagctgcaactgcccgcccccgtgcatgccgtgcgcctggaggcccgcgagctgccccccttcacgccgcagcaccgcgaactgttcgacgagcgcccacagcagtatctcggctgggaacagttgcgggaacgcctgcgcgcgcggctgggcgacgaggcggtacagggcctgagcgccgtcgccgaacaccgtccggagcgaagctggcggccgcacagctgcgacagggcgcaatcgccggcagcctgcggcctccgacccggctggctgctggcggagccacgccccctcggcgaggccttgcccaccgtgctggccggcccggagcggatcgagtcgggctggtgggatggcgaagacatccgccgcgactattacctggtggaaacccgcagcggacaacgtgcctgggtctatcgcgaggtcggcagcgaagggccgctgtggctgcatggctggttcgcatgagcgcctacgccgaactgcattgcctgtccaacttcagtttccagcgcggcgcctccagcgccgcggaactcttcgcccgtgcagcgcgcctgggctatcgggccctggcgatcaccgacgaatgcagcctggccggtatcgtgcgggcctggcaggcggcgcgggagcatcaggtacaactgatcgtcggcagcgaaatccgcctcgaacaggggcccaagctggtcctcctggcggaggacctggagggctaccagaacctctgtcgcctcatcacccgcggccggcgacaagccgacaagggccactaccggctgctgcgcgaagacctgcaacagccgctcgccggtctgttggcgatctggttgccgaacgaccatggggacgagcaggctgcctggctccgcgaacgcttcccccagcgcctttggctgggcgtcgagttgcatcgcggcgccgatgacgatgcccgcctggacaaactgctcgcgctcgcctcgcatctccggctaccgtccgtggcctgcggcgacgtccacatgcacgcccgcggcaggcgagccctccaggactgcatgacagcgatccgcaaccatctgccggtcatcgaggccggcgcctatctcttccccaacggggaacgccacctgcgcaccctggaggccctgcaggggatctacccgcaagccctgctggcggaaaccctgaagatcgccgaacgctgccggttcgatctggaacagctgaaataccagtatccacgcgaattggtaccggccggacacgacccggcgtcatggctccgccatctcaccgaacagggcatcgccaggcgctggccgaacggcgcgagcgccaaggtccgcaagcagatcgagagagaactcgagctgatcgccgaactgggctatgaaagctatttcctcaccgtgcaggacatcgtcgccttcgcccggggccgggaaatcctttgccagggccgcggctcggcggccaattcggcagtgtgcttcgccctcggcatcactgagttggacccggaccggaccaacctgctgttcgagcgcttcctttcccgcgagcgcaacgaaccaccggacatcgacgtggatttcgaacacgagcgccgcgaggaggtcatccagtacgttttcacacgctacggacgccagcgcgcggcgctgaccgcggtggtcagcacctaccacggcgccggcgcggtgcgcgacgtagccaaggccctgggtctgccgcccgagcaggtcgacgtcctggccaactgctgcggccgctggagcgaccaggcccccagcgccgaacgcctggaagaggccggcttcgatccgcagagtccgatcctgcgccgggtgctggccctgaccggcgagttgatcggttttccgcgccacctctcgcagcaccccggcggcttcgtcatctccgagcagccattggacaccctggtcccggtggagaatgcgagcatggccgaacgcacggtgatccagtgggacaaggacgatctcgacgcggtcggcctgctcaaggtcgacgtcctcgccctgggcatgctcagcgccctgcgccgcagcttcgacctgatccacgcgctgcgcggcggcaagcggttgagcatcgccagtatcccgagcgaagacccggccacctacgaaatgatcagccgcgccgataccatcggtgtgttccagatcgaatcgcgcgcccagatggccatgctgccacgcctgcgcccgcagaagttctacgacctggtgatccaggtcgccatcgtccggccagggccgatccagggcgacatggtgcatccttacctgcgccggcgaaacggtgaagagccggtggcctatccgtcagccgaactggaggaagtcttcgaacgaaccctgggcgtcccgttgttccaggaacaggtcatggaactggcgatcgtcgccgccgactacacgccgggcgaggcggacgaactgcgtcgttcgatggccgcctggaagcgtcatggcggcctggaacaccaccgcgagcggctgacccggggcatgctcgccaacggctacgaggccgacttcgcagcgcgcatcttcgagcagatcaaaggcttcggcagctacggtttccctgaatcccacgccgccagcttcgccctgctcacctacgccagcagttggctgaaacgtcacgagccggcggccttcgcctgcgccttgataaacagttggccgatgggcttctacagccccgaccagttgctccaggacgcccgccgccacgccctgcagacacgcccggtggatgtccgccacagcggttgggattgcagcctggagccgttcggccaggcgcaaccggccatacgccttggcctgcggatgatccgaggctttcgcgaggaggatgccaggcgtatcgagcaggtccgggaggcccaaccgttcctcgacgtgcacgatcttggccgacgcgccaggctcgacgcccgggccctggagttgctggccgatgccggcgccctgcgcggtctcgccggacaccggcacaaggcgcgctgggccgtcgccagcgtcgagccgcaattgccgctgttcgccgaagggaccgtcatcgaagagagcacggtcagcctgccactgccttcgcgcggcgaggaactgctgagcgattacgctctcctcggcaccaccctcggcccgcatccgctgaaactcttgcgtggacagctcaaggcccgccgctgccgcgactcccgcgaactggcgaaactgggacatgggcgaccgatacgggtcgccggcctggtggtcggccggcagcgcccacaaaccgccagcggcatcaccttcatcaccctggaagacgagttcggcatggtcaacgtggtggtccggcacgaccttgccgaacggcagaggcggccattcctcgagtcccggctgctgcaggtggagggcatcctggagtcctccggcgaggtgcgccacgtcatcgccgggcgcctgcatgacctgacccctctactcaccggcctggacgtccgcagccgggatttccattgagacaaagaaaaaggcagctcgagagacgagctgccttgggatggccaacagggatggccacgaagggggagcgctcaagatactgtttattcatacagtaaatcaagcgattcccttcaccggaagccatcttttgtctttctcctcgaagcgaggctctaactcgcggatcgggatcggtacggcgaacgcaagagcgccagcgtcatgcggatccgcccggactctcgctacgctagacgcgaaagaggacatgccaggaggggttcggcaaggtgaacaggaagcacgcctttttccgcacgcaaaagcaaaacccctggtcatcgctgaccaggggttttgggataggagcttgacgatgacctactctcacatggggagaccccacactaccatcggcgatgcgtcgtttcacttctgagttcgggaagggatcaggtggttccaacgctctatgatcgtcaagcaattcggttggatatccgttcgcttgggcttacgtctatccggattcaggtatgtgatttcaaggtgttttgcggttcatgcgaactttcggttcgtcgacttcaccttacaacacacaatcgtcagattgtttgggtgttatatggtcaagcctcacgggcaattagtactggttagctcaacgcctcacaacgcttacacacccagcctatcaacgtcgtagtcttcgacggcccttcaggggaatcaagttcccagtgagatctcatcttgaggcaagtttcccgcttagatgctttcagcggttatcttttccgaacatagctacccggcaatgccactggcgtgacaaccggaacaccagaggttcgtccactccggtcctctcgtactaggagcagcccctctcaaatctcaaacgtccacggcagatagggaccgaactgtctcacgacgttctaaacccagctcgcgtaccactttaaatggcgaacagccatacccttgggaccggcttcagccccaggatgtgatgagccgacatcgaggtgccaaacaccgccgtcgatatgaactcttgggcggtatcagcctgttatccccggagtaccttttatccgttgagcgatggcccttccatacagaaccaccggatcactaagacctactttcgtacctgctcgacgtgtctgtctcgcagtcaagcgcgcttttgcctttatactctgcgaccgatttccgaccggtctgagcgcaccttcgtactcctccgttactctttaggaggagaccgccccagtcaaactgcccaccatacactgtcctcgatccggatcacggaccagagttagaacctcaagcatgccagggtggtatttcaaggatggctccacgcgaactggcgtccacgcttcaaagcctcccacctatcctacacaagcaggctcaaagtccagtgcaaagctacagtaaaggttcacggggtctttccgtctagccgcggatacactgcatcttcacagcgatttcaatttcactgagtctcgggtggagacagcgccgccatcgttacgccattcgtgcaggtcggaacttacccgacaaggaatttcgctaccttaggaccgttatagttacggccgccgtttaccggggcttcgatcaagagcttcgcttgcgctaaccccatcaattaaccttccggcaccgggcaggcgtcacaccctatacgtccactttcgtgtttgcagagtgctgtgtttttaataaacagtcgcagcggcctggtatcttcgaccagccagagcttacggagtaaatccttcaccctagccggcgcaccttctcccgaagttacggtgccattttgcctagttccttcacccgagttctctcaagcgccttggtattctctacccgaccacctgtgtcggtttggggtacggttcctggttacctgaagcttagaagcttttcttggaagcatggcatcaaccacttcgtcatctaaaagacgactcgtcatcagctctcggccttgaaaccccggatttacctaagatttcagcctaccaccttaaacttggacaaccaacgccaagctggcctagccttctccgtccctccatcgcagtaaccagaagtacaggaatattaacctgtttcccatcgactacgcttttcagcctcgccttaggaaccgactaaccctgcgtcgattaacgttgcgcaggaacccttggtctttcggcgtgggtgtttttcacacccattgtcgttactcatgtcagcattcgcacttctgatacctccagcaagcttctcaactcaccttcacaggcttacagaacgctcctctaccgcgtcacttacgtgacacccgcagcttcggtgtgtggtttgagccccgttacatcttccgcgcaggccgactcgactagtgagctattacgctttctttaaaggatggctgcttctaagccaacctcctagctgtctaagccttcccacatcgtttaccacttaaccacaactttgggaccttagctggcggtctgggttgtttcccttttcacgacggacgttagcacccgccgtgtgtctcccatgctcggcacttctgggtattcggagtttgcatcggtttggtaagtcgggatgaccccctagccgaaacagtgctctaccccccagagtgatacatgaggcgctacctaaatagctttcgaggagaaccagctatctccgagcttgattagcctttcactccgatccacaagtcatcccctaccttttcaacgggagtgggttcggtcctccagtcagtgttacctaaccttcaacctgctcatggatagatcgcccggtttcgggtctatacccagcgactaaacgccctattaagactcgctttcgctacgcctaccctatacggttaagcttgccactgaatataagtcgctgacccattatacaaaaggtacgcagtcacctaacaagtaggctcccactgcttgtacgcatacggtttcaggttctatttcactcccctctccggggttcttttcgcctttccctcacggtactggttcactatcggtcagtcagtagtatttagccttggaggatggtccccccatgttcagacaaagtttctcgtgctccgtcctactcgatttcacttcaaagatcctttcgcgtacggggctatcacccactatggccgcactttccagagcgttccgctaaaatcaatgaagcttaagggctaatccccgttcgctcgccactactaagggaatctcggttgatttcttttcctcagggtacttagatgtttcagttcccctggttcgcctcttgcacctatggattcagtacaagatacctaggttatcctaggtgggttcccccattcagagatctccggatcaaagtctgtttgccgactccccgaagcttttcgcaggctaccacgtctttcatcgcctctgactgccaaggcatccaccgtatgcgcttcttcacttgaccatataaccccaagcaatctggttatactgtgaagacgacattcgccgaaaattcgcgcttgaactcgcaaattttaccttgacttgaatgatcaccagtgaaagagatcattcagtcttacttctatcacatacccgaatttttaaagaacagttctggtgcaaagaccagaaatcaatgttcattcacgaacattcatttctgagctttcgacgattgttttagatggtggagccaaggaggatcgaactcctgacctcctgcgtgcaaagcaggcgctctcccagctgagctatggccccgtatcggatcacgcagcacaccaacaattggtgggtctgggcagattcgaactgccgacctcacccttatcaggggtgcgctctaaccaactgagctacagacccaatcgtctaaccagtgaatcaagcaattcgtgtgggagcttatgaagaagctgagatcttcgattaaggaggtgatccagccgcaggttcccctacggctaccttgttacgacttcaccccagtcatgaatcactccgtggtaaccgtcccccttgcggttagactagctacttctggagcaacccactcccatggtgtgacgggcggtgtgtacaaggcccgggaacgtattcaccgtgacattctgattcacgattactagcgattccgacttcacgcagtcgagttgcagactgcgatccggactacgatcggttttatgggattagctccacctcgcggcttggcaaccctttgtaccgaccattgtagcacgtgtgtagccctggccgtaagggccatgatgacttgacgtcatccccaccttcctccggtttgtcaccggcagtctccttagagtgcccacccgaggtgctggtaactaaggacaagggttgcgctcgttacgggacttaacccaacatctcacgacacgagctgacgacagccatgcagcacctgtgtctgagttcccgaaggcaccaatccatctctggaaagttctcagcatgtcaaggccaggtaaggttcttcgcgttgcttcgaattaaaccacatgctccaccgcttgtgcgggcccccgtcaattcatttgagttttaaccttgcggccgtactccccaggcggtcgacttatcgcgttagctgcgccactaagatctcaaggatcccaacggctagtcgacatcgtttacggcgtggactaccagggtatctaatcctgtttgctccccacgctttcgcacctcagtgtcagtatcagtccaggtggtcgccttcgccactggtgttccttcctatatctacgcatttcaccgctacacaggaaattccaccaccctctaccgtactctagctcagtagttttggatgcagttcccaggttgagcccggggatttcacatccaacttgctgaaccacctacgcgcgctttacgcccagtaattccgattaacgcttgcacccttcgtattaccgcggctgctggcacgaagttagccggtgcttattctgttggtaacgtcaaaacagcaaggtattaacttactgcccttcctcccaacttaaagtgctttacaatccgaagaccttcttcacacacgcggcatggctggatcaggctttcgcccattgtccaatattccccactgctgcctcccgtaggagtctggaccgtgtctcagttccagtgtgactgatcatcctctcagaccagttacggatcgtcgccttggtaggcctttaccccaccaactagctaatccgacctaggctcatctgatagcgtgaggtccgaagatcccccactttctccctcaggacgtatgcggtattagcgcccgtttccggacgttatcccccactaccaggcagattcctaggcattactcacccgtccgccgctgaatccaggagcaagctcccttcatccgctcgacttgcatgtgttaggcctgccgccagcgttcaatctgagccatgatcaaactcttcagttcaatactgcttgggttttgagaaaaccctaaacttggctcagcaatcgcattctcttaaaaagagataaaactctcgaattcacgagtgttacttgcgttgctgataatcttgcgatcaccagtcttacatcacaagcacccacacgaattgcttgattcgacttgttaaagagcagttggtcaaggctttcgtctcaaccgaggccgcgcattctacagcaacctctcgttccgtcaagcgttattttcgaaaattttcttttctactcaaccgcttgcgccgaccttcaaaccatcttccgatcagcgggaggcgcattctacagcgttcaaattcgctgtcaagcacctcgatgaagcttcgtttcgagcccctttcggggctgaaccgctgcggtgaacaacctgccggagcgcttcaccacccctgggagagaatccgtaaatccttgattttcaagcatttactcttcgccgtcgccgggagtggtgcgcattatagggagatagaaactggcgtcaacacttatttgaaactttttaacccaaaggtcaggaagcccagaggacgccccattcctcctttataggctggcttgccccgccctctccttctgttgcctcatataaggaatgcgagccacggctccgccgctttcgacgagtgttccatgcgcctcatacatacctccgactggcacctgggccagaccctgcacggccaggaccgcgatcatgagcatgcgcgcttcctcgactggctgctgcgccagctggaagagcagcgcgccgatgtcctgctgatcgcgggcgatatcttcgacacgatcaatccaccgctcaaagcccaggagcgcctctacgacttcatcgtcagcgcccatcgacggctgccgcggctggagatcgtgatgatcgcaggcaaccacgactccggcgcgcgcatcgaactgcccgctccgctgatgaaacgactgaacgcccatgccatcggccgaatcggctggatagacgaaagcctcgatagcgatcgcctgctgctgcccctgcacgacgcggatggccaggtcgccgcttggtgcctggccctgcccttcctgcgtcccgccgaagtcaccggaggcgggctcggcgacgattacctggccggtatccgccaggtgcacgaacgcctggttgccgccgcgcacgcccgtcgcacgccgggacaggcactggtcgccgtcagccacgcacacatggccggcggctcggtttccgaagactccgagcgaaacctgatcatcggcaacgtcgaagcgctgcccgccagcctgtttccggagcagatcgcctacgtagccctcggtcatctgcacaagccacagaaagtcgccggacaggagcgcattcgctatagcgggtcgccgctgccgctgtccttcgccgaagtgaactatcgccaccaggtcctcctcgtcaccctggaaggtgagcgcctgaaggatgtacagagtctcccggtgccacgcgcggtggaactgttgcgcatcggccccgcgcctcttggcgaggtgctcgatcgaatcggcgaactggccgaggccgacctgctgaacgaacagcggccctggctggaggtccgcgtcatgctggatcagccgcaaccagacctgcgccagcaggtcgagagcgccctgctgggcaaggcttgccgtctggtgcgcatcgccagcgagtaccagcgccgcgacgaagagcaggcgccgctgctcgggctcgaccaactcaacccccaggaactgttcagccgcgcctgggaaagcgcctatggctccggcccggatgcgcaggcgctggatgacttcgccagtctgctgcaaagcgtcgaactggccaccgaagagcccccggggaaataagccgttccatgaagattctcgccatccgcctgaagaacctcgcctccctcgctggcgagcaggaaatcgacttcacccgcgaaccgctgtccagcgccggcctgttcgccatcaccggtccgaccggcgccggcaagagcaccgtgctggacgccctgtgcctggccctgttcggcagcacgccgcggctggaaagcacttcggccagcagcaaggttcccgatggccggaacgagctgtccagcaacgacgaacgcaacctgctgcgccgcggttgcgccagcggctacgccgaagtggatttcgtcggcatcgacggccaccgctatcgcgcccgctgggaaacccggcgctcccgggacaaggcggacggcgccttgcaaaagagccagcagagcctccaggacctggagacccagcaaatgctggcagcgaacaagaaaagcgagttccgcgaacagctggagcagaagctcggcctcaatttcgcccagttcactcgcgccgtgctgctggcccagagcgaattcagcgccttcctcaaggccagcgacaacgaccgcggcgcattgctggagaaactcaccgacaccggcctgtacagccaattgagcaaagccgcctatcagcgcgccagccaggccgacgagcagcgcaagcaactcgagcaacgcctggaaggcagcctgcccctggccgagcaggcccgggccgggctcgaggcggcgctggaatcccacgcccaggcgcgtctccaggagcaacaggcactgcaacgtctggaaggccagcaacaatggttcaccgaggagcagcggctgctgcaatcctgcgagcacgcacaaggtcaactggccgaggccaggcaggcctgggacgccctggcgacggagcgggaaaccctgcaatggctggagcgcctggctccggttcgcggactgatcgaacgcctgaagcaactcgagcaggaactccggcactccgagcagcagcagcggcagcgcaccgagcagcaagccgcgggcgccgagcgcttgcaaggattgcaggcccgcttgcaggaggcgcgcgagcgccaggcccaggccgacaaccatctgcgtcaggcccaggcgccgttgcgcgaggctttccagctggagagcgaggccaggcgcctggagcgaacgctggccgagcgacaggaactccatcggcaatcgaaccagcgccacgcccagcaaagcgacgccgctcggcaactggatatggagcagcagcgccatgtcgcggaacaggcgcaactgcaggcggcattgcgcgacagccaggctctcgccgcgctcggcgacgcctgggcgacccaccagggccagctcgccgccttcgtgcaacgtcgccagcgcgcgctcgaaagccaggcgcagctccccgagctggaaaaatccctggcccaggctggggaaccgctcgaacgcttgcaggcgcaatggaccgccctccatggcagcgagccggacgacctggcggcacgcctggacgaattgcgccggcagactgatagcctggaacgacaacaagcgctccacaaggaatggcaacaggccctcgaccaacgcaccggcctggctcgacgcctgggcgaactcgaccagcgtatggtcgagcaggagcaggcattgctcgacctgaaacgacaaggcagccaatgcgccgaggaggtgaaggcggcggagcaggccctgcaggtcacccgcgagttgctccagcgccaacgtctggcccgcagcgccagcgtcgagcaactgcgcgccggcctggtggacggcgaggcctgtccggtctgcggcagccaggagcatccctatcaccattccgagcaactgctcgccgccctcggtgaacacgacgaccaggagcaggtccgcgccgagcagtccctcgagcggctgcgacagaccctggtcggtctgcgcgagggctattccagccagcgggaaagactcaaccagagtcgccaggagcagcaggaactgactggccaactggccgcgctcgatcggcaactggaccaatggacgctgccggaagaactgcgactcctgcagccgtccgcgcagttggagtggctggcacaacgcctggacgacctggcagggcagcgccagcagtgccaacgagacttcgaccggctgatcgcccgccagcgccagacccagcaattgcagcaggaactgcgggccgccgagacgatcctgcaacagcgccagcaggcgctgacggaacaacggcagcgctacgaacatttgcagcagcaggtcgaggaggacagccagcaattgcgtccattgctctccgacgagcactggcagcgctggcaggcagatccgctgcggactttccaggcactcggcgagtccatcgagcaacgccggcagcaacaggcgcggcttcagcaaatcgaacagcgtctgcaggagctcaagcagcgctgcgatgaatcgagctggcaactgaagcaaagcgacgagcaacgcaacgaagcccgtcaggcagaggaaagggcccaggcggaactcgccgaactgaacggacgcctcggcgctcacctgggccagcacgcctgcgcccaggactggcagctatcgctggagcacgccgcgcaagcggcgcagagcgccgtcgagacgctccaggcgcccctggattcgctgcgcgaggaacaactgcgactcgccgaagccctggaacacctgcagcagcaacggcagcgccaacaggatgagttccagcgccttcaggccgactggcaggcctggcgcgaacgccaggacaacctcgacgacagccgcctcgacgccctgctcggcctttccgaggaacaggcgacgcaatggcgggagcaattgcagcgactgcaagaggagatcacccgccagcagacgctggaagcagagcgccaggcgcaactgctccagcatcgccggcagcggccggaaaccgaccgcgaggcgctggaagacaacctgcggcaacagcgcgaacgcctggccgccagcgaacaggcctacctggatacctacagccagttgcaggccgacaaccagcgccgcgagcagagccaggcgctgcttgccgaactggagcgagcccgcgccgagttccgcagatggggccgcctgaacgaactgatcggttcgtccagcggcgacaagttccgccgcatcgcccagggctacaacctcgacctgctggtgcagcacagcaacgtgcagttgcgccagttggcgcggcgctaccgcctgcagcgcggcggcagcgaactgggcctgctggtggtggacaccgagatgggcgacgaactgcgctcggtgtattcgctctccggcggcgagaccttcctgatttccctggccctggcgctcggcctggcctcgatggcatcgagcaagctgcgcatcgagtcgctgttcatcgacgaaggcttcggcagcctcgacccggaatccctgcaactggcgatggatgccctggacaacctgcaggcccaggggcgcaaggtggcggtgatttcccacgtccaggaaatgcacgaacggatcccggtccaggtgcgggtccagcgcgagggcaacggcatgagcagcctgaaggtggtcggctgagccgaccgcccaggcggcacgtcagaacggcagctcggtctgttcacccggagcatgcggcggctgctcttccctttccggccgcagatgcagcatcagcccgctgagccggcgcaccttgcgccgcactgcttcctcgaacaccccgggcaggctttccaccaggctgaaccagtcgcgggcgcgggtgataccggtgtacaccagctccttggtcagcaccgggttcagcgcgtccggcaggaccagcgcggtatgggcgaactccgaaccctgcgacttgtgcacggtcatggcgaacacggtgtccacctcgaccaggcggctcggcaggacgaagcgcacgccgccgctaccgtcgttgcgcgggaaggccacgcgcagcgcgaagcgcaggctgccgtcgtcgttgcgctcgggcaggcgcagggcgatgccgatatcgccgttcatcagccccaggctgtagtcgttgcgcgtcaccagtaccggccgcccctcgtaccagccgtgatcggcctcgatcaggccaaggcgcagcagttctgccgctacccgctggttcagtccttccacgccccatgggccgcggcgcagcgcgcagagcaggcggaaggcgtcgaaagccgtcagtaccgactgcgcccagcgctcccaggcgccatcctccagcgccagtccggcggccgggcggccctcggccaggcgttgcaggtagtgccggtagccgtacggcgtgcccggcgcctgcggatgaccgtcgacgaacagccgggcgaaggctgcatcgcgctccccgcgcaggcgcaggtcgaagaggtcggcgggcggactgtccagcagcgcgcgcgcgtcgccggcctgttgccggttgaccaaccgcgccaggcgcccgatcccgctgctcgcgccgaagcgccgggaatgccgcagcatgacggtctgttgcgccagcggatgcgcctgcgccgaaccttcgcgcaagccctgccaggtttcgccgctgacccgctgcaaccaggcgcgggtctcggcgctgtaccagccctcctcggcatcccggcagagatcgccgagcaccgcgccggcctctaccgaggccaactggtccttgtcgccgagcaggatcaggcgcgcctgcggcggtagcgcatcgagcaggctggccatcatttccaggtcgatcatcgaggcctcatccaccaccagcacgtccagcgccaaagggttgtcccggtggtggcggaagtgccgggtatccggacggctgccaagcagacggtgcagggtagtgacctcggcggggatcgcctgcaacacgtcttccgccagcggcagggcccggacctgctggccgatggattcggagagacgcgccgcggccttgccggtgggcgccgcgaggcggatgcgcagcggctggccggcggctaccgccggtgcctggagcagaccgagcaggcgcaccacggtggtggtcttgccggtaccgggaccgccggtgatcaggctgaaatagccgcgggccgccagggcgcaggccagcttctgccagtcggtgacgcgctggccgtcttccgtaggcgcctgcgcgaacagcgcggccaggcgcggcgccaggtctgcggccaggggcgcctgccgacccaggcgctcgcgcagggccagggcgatctccaactcgtgccgccaataacgacgcaggtagagacgctgggcgcaaagcaccagcggcgaggtcgccgtctcgctcggctcgggatcgcctgggcgctcgtcgaccacctccaccagcggtgacgccgccagggcctcgcgccaggcgtcgaggcgcacgccgtgcagcagttgcgacggcaacagcacatcgcggccttcgtcgccttccggcggcagcgacagtgccgcgtcgggcgcgccgagggtcgcctccaggtccaggcagacgtgcccgtggcccagttggtggctggtcagcgccgccgccagcagcacccggggatcggcctgcggctgcaactcgacgaggaaggcgacgaacgcccggtccagcgcccgtagccagccgcgcgccacccacaggtcgagctggcgcagcaggtcgtggcgtaccgccagcggttgcgctacctggtcgtcgcggccatcgcggacttcgccggccagttgcttgagggtcggattcatcgctcggctcccggctggccgctgaacagcgcgtccaggcgttcgatcagttcccgcggcgggcgctcgaagtgcaggccctgggtcgccgcgcgggcgccgcgaaggaacaggtacacggcgccgcccatgtggcggtcgtagtcgtagtcgggcaggcgcgccttcaactgccggtgcagggccagcaggtacaacacgtactgcaggtcataacggttctccagcaccacggcggtcatcgcttccgggctgtaggcgccgtcgtcggcgcccagccagttggacttgtagtcggccacgtagaaacgcccctggtgctcgaagaccaggtcgacgaagcccttgaacatgccgttcagcagggtcggcgccagcgccggacgcgccgcgccgccgagggtatggcgccggaccagggcgtcgatcgcctcggcctggacctggtgggtggcgaaccagaactccatttccacctggtaggcgaccagcccggccaggctggtttcgccaccgggccagcgcagcggttcggcgagatactgctccagccacaggtcgagcggttcggcccagtccttccagccacgcagatcgcagcgtcgcgcgaccagttcgcggcgccgctgggcatcggcgcgcgccacctcgaagccttcgcggccggcccattcgagcagcccgtggaggaaggtgccgggagccggtccgcgcgggaagcgatgcaggtcgtcgcgcatctcgctggcgtgcgcgaccggcggctgttcggcggaacggccttcttcgtggaaggtggcttcctcggcgctgatcggctcctgcgattcgtcgctctccaacacctcgtcatcgtccagcccggcggaggcctgcaattgcaggccggaatagctggcgacccaccacttctcgcggctgctgcggcgggtttcgcgggcctgcccaaggccctggccgcgccctgcgacatagcgttcggcgtccgcctcgggggccggctcgacgacaatctcccggcactcaccgcgcaacgcggcgaggcattgtccgaggccatcgctgccgatggtcgcgccgccggcaagcaggtagcccagggcccccttgtgcaactccggcgacttgctgttgctcgccaccagcggcgcgatgcccagccacaccgaatggcgggcgcgggtcagggccacgtagagcaggcgcatgtcttcgccgaggcgctcgtcgttggcctgctcgtaggcccgcgcagcctgctccttgcgccgcgccagctcgatgacccgccctgcagcgccatcctcgtggaaactcgccggcgcgccgctgttgccgtccagctccctccagctgcagatgaagggcagcagcaccaaggggtattccagccccttggacttgtggatggtcaccaccttgatcaggtcggcgtcgctttccaggcggaggatctcttcgctccccggactctgcacctgctcggccagatggcggatcagcgcgtgctcaccgtccagctccaccgccgcgcgctgcagccactcggccaggtgcagcaggttggtcaggctgcgctcgccatcggcatgccgcagcaggcgcgccggcagttcgaagtcggcgagcaggcgccgcagcatcggcaatacgccctgggcctgccaggaccggcgatagtcgcggaagcgcaggaccatccgttcccagaacaattcgtcctggttcaatcgttccagggtcgcccagtccaggtgcaggctgcgggtagccagggcgacccgcagcagcgtatcggcaccgggatcggcgcaggcacgcagccaatgcagcaggtcggcggcttcctggctgtcgaacaccgagtcgcggtcggacaggtagacgctggccagtcgtcgcgccgccaacgcgctgcggatcgcctcggcctcggcgcgaccgcggacgaggatggcaatatccgccgggcgcaacgcccgccagccgccctgctcgtcggcgaagccggcgcggcccaggtcggccaggctcagccagcggcggatggcgctggcgctgcgctcggccatttcctggcgatacgccgcggagccgagcacgccggcttcgacatcaaggttccagaacgtcatcgctggcgcctcggcaccgtcgatcaacaaacgttcggcgcgcccctgggcgtccaccgcatggaacggcaccgggttttccagcccctcgcgggcgaaacggaaggcgccgcgcggatgctcttcggcgaaggcgaagcagcggttggcggccgccaccatggcggctgtcgagcggaagttcttgccaagggtgtaatgccgcccgcgagtggcctcgcgggcgcgcaggtaggtatggatgtcggcaccgcggaaggcgtagatcgcctgcttggggtcgccgatcatgaacaggccggtttcccgcgcctggggctcgtcgggatcggcggcgatccggtagatgcgctcgaagatccggtactgcaccgggtcggtatcctggaactcgtcgatcagcgccaccgggaactgctcgcggatcaattgcgccaggcgctcgccaccagggccctgcagggcgcggtcgaggcggctgagcaggtcgtcgaagccgatctcggcacgccgctgcttctcgatctccagttcgtgcccgacttcgcccaacgcgtgcaacaacaggtggggagcgagatcgggacgctcttcctgatgcgcggtccaggcgtcgatggcccttagcgcggcatgctcgggcgccacgcgcttggcggtgagcttgatccgggtctggccgaacttgccgaggttggccggctgctcgccgccctcgctccagtccgccaacgcttgcagccaggcgtcgaaggtctcgtcgctgtccttgccgcgatagctgttgccgttcaggtagggacgcaggtcgcgcagcagcgcttccagttcgacgcgcgttgcgcgccaggcggcgcgggcctgcgcgtccagttggtcgagctggcgataccagtcgccgccctgctccagcaaggctgccagcgactcgggcgcactcagcgcctggtcggcgtagcggaagtcggcgtcctgccgcgccagcagcggctgcaaggccttgcccagcgtctccggcccgctgtagcaactggccacggcttgcgccgccggagccgtcaggccgtagaagttacgccgccagtagtcccgtaccacttcggcgagcaattcgctctggtcggtttccaggttctgggtgaacaggctgccgctgtcgaaggcgtgctcgcgcagcatccggtagcaccaactgtggatggtcgataccgcggcctcgtccatccactccgcggccaggcgcagcaggcgcgcgcagcccggccagcgctcggcgggatactgctggcgcaacgcgaccagcaggccgtcgtggcgctcctgcggctcggcgaaacaacgcgccgcttcgcccaggcggctgcggatacgctcgcggagttcctgggtcgccgcatcggtgaaggtcaccacgaggatttccggcgggctcagcggccggccgaaagcgttctcgccgccatggtcgaggaccaggcgtacgtatagcagggcgatggtgaacgtcttgccggtaccggcgctggcctcgatcaggcggctgccgtgcaacgggaagtccagcggatcgagggccacgggcatctgctgctggctcatgcctgctcctccgcgccacgtcccagggcagccagcagcggcgcgtagagctgctcggcccagtgcgcgaactcaccgctggcgagcagccggtcgaagtccggatagacccgagccagcgccggcgaggcgtccacctcgccccccatgccgaaccctccctcgtagcgcttgcgcgcctcgcgcatggctttctcgggctctgcggcgccaccactggcgagccaggcgaaagcggtccggcaggccaccggcaacggctggcgcatgccctggcgccaggcgtcgatcaactggtcgaggtactcgctggcacgctcgctcggcaacggcggaatctccagggtgccggtctggctcaccagcacgctgctcaccggctggcctagacgttgcagggcgaggtgctgcaaccagtggcgtaccaggctgtgccacttgaagctgcgcccctcatggagcttgccgctgagcaattgcaggcgcgccaggcgcccggaagcgtcgcgacgcaagccgccgagccagtcctccagctccagcccggacggatggcgatggcgcaactcctgctgctgctcgaccgcctccggccagcgctcgatttcctggcggtagcgccagagcaggtcgggcagcggttgcagcaaatggcgcgcggagaactcgccgaacgccgccagcggcaggcgaccctgtcgccgcagtcgctcgacctgggcctgcaactgcaccggcaggccctcggcatcccagtcccgctcgacccagcgcttcatgcgttcggtcagctcgaattgcagcttccagttgtccagcgcgtccagctcgaaaggctcttcgtcgttgccggtcaattgctcgtcgtcgaaacgcaccttgagccgctgctggaagaacgcattcaccgggttggcgaggaactccgccagcgctcgcagccccagcgcgccctccagctccagcggcggcaggggcgcttcggcgtcgggaacgccgatctcgtcctcgcgatggacctcgcgccactcgcgggcgtaagtgaacaggccatcgacgccctgctccggcgcatcgtgaaaataccggcggctgaacggctgcagcggatgctcctgggtcagggcacgcagcagcgcctcgccgtcgccgtccggatccaggcgccagccggccgccaggtgatcgcgcaactggccgatcagcaccgagggcggccgctcgccattgtcgcggatactccgccccacccagctcacgtagagttgctcgcgcgccgagagcagcgcctcgagcagcaggtagcggtcgtcctcgcgccgcgagcggtcgccggggcggtagtcgttgcgcatcaagtcgaaatccagcggcgactgctggcgggggtagtcgccatcgttcatgccaagcaggcagaccagccggaacgggatcgcgcgcatcggcatcaacgtgcagaaactcaccgcgccagccaggaagcgctggttcaggccgccctggtccaggccgccgagccaggcctcgcgtatcacgctgatcggtagcggctcggcgaaggccgcacaagcgcagtgttcctgccagcgctcgagcaattgcaggagctgggtgagaagcagttcgtcgcgctcgtcgtgagcctcgaagaacaccgtgagcagggcttgcaggcgctcgccccactgcgccggggtggccggttcggccagctcggcgtaggccacctcgaggcgctccagcagcacagccagcgggcctgccagggcggcgtccagaccaccgacctcatcgtagggctggatgccttgcagggccgcgccttcgccgaccgcgtagccgagcagcatgcgccgcagaccgaagcgccaactgttgccctccagtcccgctggcaggccgagacgctcgcgctgcgcggcatccagcccccagcgcacgccggcgccttcgatccagcggtgcagggtcgccaggtcggcctcgtcgacgccgaaacgccggcgcaatgccgggacgtccagcaggtcgaggatctcgctcacggcgaaacggctgtcgggcagtttcagcaggtgctccagggcgatcagcagcggctcgcgaccgcgctgtccctggtcggccagggtatagggaatgaagcgctggtcgtcgcgcggcacctggccgaacaccgcctcgatgtgcggcgcgtaggcgttgatgtcggggaccatgacgatcacgtcgcgcggcttcaggctcggatcggcgttgaagcgggcgagcaactggtcgtggaggatctccacttcgcgctgcgcgctgtgggccacatggaagcggatcgaggcgtcgctccgcggcgccaccggcggccagtgctcgcgggtttccgccaacgggcgcagttcgaggatatcgtcctgcaactggccgagcagcccgtgcggggcctcctcgctgaacaggtcgatgcgcccgccgttgacctcgccgaacaggttccgatagctgtccgggtcgtcgtagctgtcgagcaggttgatgtagtcgcggccctgcttgccccaggccgccagcaacggctgggcatgctggtgctggcggtcctcgtcgaggtcggcggggacgccggcgcggcgctgctggcggcggtactcgtggcgcaacaggtccttgtcggcgacgatgtcggcccagtggtggcgacaggggttgtgcacgcagagcagcacctggctgaacctggccagggcggccagcgcctcgagggtctgcgccggcatcgaggaaatcccgaacaccaccactcgtcgcggcaacgcgcgcggcgccgcgctggcggagcgcagcgcctcgatgaagcgccggtgcacgccggagcggctgcgggccaggctatcggcaccgacgtcggcgagcagcgcgcgccacaattcggcctgccagcgctcgtcggcaccgagcgggcgcgcctgcccgttcgccgtgcgcaactggtcgcggccctggctccagtcgtcgagccagtcgccgcgatagacctggtactggtcgaacaggtcggccaggcgctcggccagttgatgacgcttgcgcaggtcggcatcgtcggcgaggaaacgttgcagggtgcggaactcgggacgctccagcaatccgggaagcagacgcatcaggcgccaggtcagcggcgccttgtccagttcggaaacctcgggaatgctttcgcggcccagcaccgcgcgataggcctgccagaggaactgcgccggcaactgcacctccagcgccgcggcgatgccgccaccgccgccgccgtcctcgcggggatcttcggccaatgccagcttcaaccattgggcgatgccgttgctgtgcaccaggacccgctcgctttccagcggcgccagcggatagcggcgcatccaggaaacggcgaggtcgcgcaggtcgtccaggcgattgccgtggacgatcatgaatccgggcgtgagggcggtggttcccaagggttctggcatcggtacggctattcctggcgcaaggctctggcgaaagaggtcaggatcgagcggcgacgaagcgtcgttccagttcgaggctgtcggccatgcggaaatcgctccagcgctcgctcaggccgagatggctgtccgcctggcaatccggggcactggcgcaacggcgggtgaaggtgttgaccacctcgaccatctcctcgcgctcggcgccgaccagcagcgccgcgtgcgccagcaccaccggccggccggcgccgttgcgccgccagcgttgcgcggtcccggcgagcttgcgcccatccagggtgacattgtagcggccgtcgcagaaggaaccggccacggcgcccacgccggcgtccaggccgcgctcgcggagccagtcgcagatcggctggcacagccgcaggtaggcggtttcgatacgggtctgctcgttgtcgccgggccccagcgcataggacagggcgatgttcagcacgcccggcgattgcggcaccggctcgccgccggtatcgcgcagcagcaccggccagccgcgttcggcgaccgctgcgctggccggcgcgaatccttccaggcgctccatccggcgcggcatgaccagcgcccgatcgcagggcagccagagcaacaggccatgctcgcgggcaccgccacacacctcgtcgagcagggcgcgctcggcgtccagcccatcctgcacggaaaacacttcgaccacgattcttcctcttccaggctggcacggctcggctcccacgcggggagcgctgcctatgatagccagtggcggcgcctccgtgcgccgtaatcgcgaggaagttgccgggaaatcagcaggttgccgagcgcagacgggccgggcggcgctgccagaactcggccagcaggaccccggccagggtcagcgcgccgccgaccaggtgatggacggtcaggcgctcgccgagcaccagggtggcgatgcaggcggtgatgatcggcagcaggttgaagaacagggccatccggctcggcccgagacgggcgacaccgtgcatccaggccagcgcggcgacgatcgaggcgaacagcgcggcgtacagcaccagcggcaggttggcggcgttcaggccggtgcgcggcgacagcaggtacagcggcagcagggcgaggatcgccaccagcacctgcaggtagagcagttgcatggccggcagcttcaggctccatttcttcagcagcacgctgtacaccgcataggccagggtggcgacgatcatcatcgcgtcgccgagattcactccatgctccagcaaagcgccgagatggccctgggagatcaccagcaccacgccggccagcgacaccagcgcgccgagcagcgccccggcgttcagccggtgggccaggatgctgctggccaggcccagcgaaatcaggggcatcagcgacaggatgatgcccatgttggtggcgctggtcagcgccgccgcgtagtaggccaggctctggtagacggccatgccgagcaggccgaggaccacgaacttgccgaggttggcgaggatgtagcggcggttgcgcagcaccgggccgagcatgaagggcgtcagcgccaggccgaccagcagccagcggaagaaaccgatctcggcgggctggatgacccccacggcgagcttgttgacgacggtgttgccggcccagatgaacacggccagcaggggaaacaggtattgcatgggaggttccgcactatgaaaaaggaatacgcggccattctgagccagtccgaatacagacgtataatgaattccagacaaaccacccgtaggttcggacatgtcgaccaccaccttgctgcgccttcccgatctccaggggcagtctttcgacgtctatttccgctatgacgagttcggcgccgacacccattcgccgccgcacacccacgcctggggccagctcaactatgcagcccatggcgtgatgcagctggagatcgacggccagcgcttcctctcacctccgcaatacgcggtatggataccaccggagcgggtgcacagctgctacaacagccaggccatcgtctaccgctcgctgtacctctccgccgaactgtcacgacgcctgccggcgacaccttgcaccctggcgatcagcgcgatcctcaaggcgatcctctcggacttcgccgagcgcggggtcaacctgccgacctcggcgcaggacctgcgcctggcccgggtcgtcatggaccagctggaatgcgcccagccccacgacgactacctgccctacggccgtaccccggcgctgcgcgaggtgctcgacgcactgcaggccgagccgggcgacaaccgctcgctggcgcaatgggcgcagcaggtgcacagcaccgagcgaaccctggcccggcactgccagcgcgaactgggcatgaccttcggcgaatggcgccaacgcctgcgcttcctcgcggccatcgaggcgctggaagccggcagggggatccagcagatcgccttcgacctcggctacagcagcccctcggcgttcatctcgatgttccgccggctggccggcaccacaccggaacaataccgcctggccagccgcgcccaggacatgccgatgctgtaacccgccgtgcatgcgttgcggctatgctcgcagcagccaccatccggagttcgcatgccaaccgccagccgccatcccgacaccgccctcgcggtgttcctcgccttcctcaagctgggctgcagcgccttcggcgggcccatcgcccacctcggctatttccgcgacgagttcgtccgccgccgcggctggctgagcgaaagcagctacgccgacctggtcgccctctgccagttccttcccggccccgccagcagccaggtcggcatggccctcggcctggcccgcgccggctatcccggcgccctcgccgcctggctcggtttcaccctgccctcggcgttgctgctggtgctcttcgctctcggcctgggacgctggggcgcgctgttgcccgagggcgtgctgcatggcctgaagatcgccgcggtggcggtggtggcccaggcggtctggggcatgggtcgcagcctgtgcccggatcgcccgcgcctgacgctgatggcgctgtcctgcgcgagcgtgctggcctggcccactgcctggacccaggtcgcggtgatcgccggtgccggcctggccggcctcgccctgttgaaaacggaagcagtggaaggccacgagcgactgccgatcgccattggctaccgcggcgcgctgctgttcctcaccttgttcgccgtgctgctggtctgcctgccgctggccgcgcgcctctggccggaacactggctgcgcctgctcgacgcgttctaccgggctggctcgctggtattcggcggtggccatgtggtgctgccgctgctgcaggcggaagtggtacccaagggctgggtcgacggcgataccttcctcgccggctacgcggccgcccaggcggtaccgggcccgctcttcaccttcgccgcgttcctcggcgcagcctcgggcccggcgccgaacggctggagcggcgcgctgctgtgcctgctggcgatcttcctgccgtcgttcctgctggtcgccggtgccttgccattctgggaacgcctgcgccacgaacgccgggtacgggcaacgctggccggggtcaacgcggcggtggtcggcctgctgctggcggcgctgtaccagccgctctggaccgaaggcatcctgcgcccggccgacttcgccctgctgctcttcgccctgctggccctgctcgcctggaagacgccgccctggcaagtggtgctcgcctgcgccgtggccggcggcctgatcgccacagccggctagccgttcaaggccaggctcagcccctgcgccgccggcgcggccgccttgcccggctccgcgccctccggccggtagccgaggcgcaggccgccccagtgcttgccgtggatgaagatcggcaccgaaagatcgtgcatcagctcgccggtgtcacgggtgtaggtctgtagcaacagcggctgctggtggctgccgcagcgaatcccggtgcggtcgttgaacaggcgcttgctgcggctgcgcaacgcgtccgtctgcgggtcgccgctgggcggatgggcgaaggcgcgattgtgggtgggcacgtagccttcgggggtacaggcgatggcgaataccaggttgcggttgcgctccagcaactgctcctggatgcccggcaggacctggtcggtgtagctgtcgaagcgggtccggtacttggtcggctgggtattgggcaacggctggtagctgcggtcgaacaggtcgtcgaggtcgatgcgcccgctgcgcacgtcctcctcgaagcgagcggcgatagccgccgcgccctcccgggcgaggtcgtagaccgactggtggtaggcgtccaggctgacctcggcgaggcgctcgctgatcacctcggcctggttctccaactggctggcagcttcgccgaggcgcagggtctgttcctcgctggcgctgaggtcgccgcgcacctgctcgaccgcggcgaacaggctggcgagttggctgcggttgatctcggcgccctgggcgatctcggtaatctggctttccaccccggccgccagttcggcaatgccttccagttgccgaccggtcagctcgacctggccgaccccttcccccaactcttcggaaagctggcggatctgctcgaccacctcgctggtctggcgctggatctcggcgaccatctggccgacttcctcggtggcctcggcggtacgtccggccaggccgcgcacctcttcggcaaccaccgcgaagccgcgcccatgctcgccggcgcgggccgcctcgatggccgcgttgagggccagcaggttggtctggctggcgatgccctggatcaccagggtgacccgctggatgtcctcgctgcgctggttcagcgcctcgatcgcctcgcggctggcgcccatccgctcgctgagccgatgcatgcgctcgatggtcgaggccagcagcacctggccttcgtcgctgccggcgcgcgcccgggtggcggcgtccatggcctggcgcgccagattggaggtggcgcgctcggtgtggatcatcacttcggcgctgccgacgatctgttcggcggcgtcgagctgggattgcagcttctccgccaggcgcttcaccgagaacgccacgccggcggccgacaaggcgttctggctggtgttatgggacaggtcgcgagccagccgggcgatgtcgggctcgccgacggtcgccaccgccgtgcggttgccgggaagcagccagggcaaccagagcagcgccacgccgagcggcagggccaggtacagcggcagccagccatgccgggcgccgaccagcaggagaaccagggccaggctctgcaacaggcagacgaagaggatgcgggaacgagcgggctgcatgagtaaatctccggcctccggggcgttgcgtcatgaccctggggtcggacgggcgacggcggggcttctttatttgacttgtagtccggtttgtagcccgcccccggaagcgccgccatcgttccttagtggtatggccaatggctggcattcgactagcgcaggccgcgacgaaaggcggagaacaccccggacgcgtcggccaggccttgatccatgggggcttcgccgcatttccaggggacgctcgaagaacttccgtcctgccgtccgtcggccgacaccgtatgacaagcccggagcccacgttataattccgcgcccatttacagccggtagcggtcgactagactcccaaccggcgctggccggaccccgcttccgcccagcctggtcgctatcgggcccgctctttttggactcaggaccacccgtgacgaaagacgaattgcgtgccgcgctggcgcgcgaggaacagcgttacaaggacgtgtacggcggcgaagtgacgctttatgccgcccagccggaacccgaccgcaagccctggcgcaaacgcccaaccgttcaggagcaggcgttcgacagagaactgcagaagatcgaagaagagcgtctcaaggccgggcaggaagcagcgaaccccattccatttacctccaaccgacaggagagcgacggataacgaagcgtttcaatctgtttcgtttttcccgcaaagcccgatgcgacggggcgttgcccgcgacaatggcaaccttccggagttccagacggataaaaacgcatctggcataatcgccgccccgtctctgaccggtttctcacatgttcgatcttttcagcgggctcgatgcctgggtgggtatcagcctggtgctggccctggccttcgtcctcaccttcgagttcatcaacggcttccacgacactgccaacgcggtggccaccgtcatctacaccaaagcgatgtccccctaccgggcggtgatgctctccggtgtgttcaacttcctcggcgtgctgctcggcggtgtcggcgtagcctacgccatcgttcacctgctgccggtggagctgctgatcaacgtgaacaccggccatggcctggcgatggtcttctccctgctcgccgccgccatcgcctggaacctcggcacctggtacttcggcatcccggcctccagctcgcacaccctgatcggctcgatcctcggcgtcggcctggccaatgcgctgatcaccgacgtgccgctggccgaagggatcaactggcagaaggcgatcgacatcggcctgtcgctgatcttctcgccgctggccggcttcatggtcgccgcgttggtcctgctcggactgaaatggtggcgtccgctgtcgaagatgcacaagaccccggaaacccgtcgcgaactcgacgagaagaagcacccgccgttctggaaccgcctggtgctggtgctttccgccatggcggtaagcttcgtccatggctccaacgacggccagaagggtatcggcctgatcatgctggtactgatcggcatcgtcccggccaagttcgtcctcgacctgaacagcaccacctaccagatcgagcgcacccgcgacgccgccctgcacctcagtcagttctaccagcgccacaccgataccctcggcgacatgctggccctgggcaagagcaatggcagcgagatgccgcagttctaccgctgcgatccgaaacagaccgagccgaccatcaacgcgctgctccgcgacctgcgcggcgtgcccagctacaacgacctggacgccgacgagcgcgtgcaggtgcgtcgctacctgctgtgcctggacgacaccgcgaagaaggtcggcaagctgtccgacctgccggcgcgggagaaggccgacctcgagaagctacgcaaggacctgaccgcgaccaccgaatacgcgccgttctgggtcatcatcgcggtggccctggctctcggcatcggcaccatggtcggctggaagcgcgtagtgctcaccgtcggcgagaagatcggcaagcagggcatgacctacgcccagggcatgagcgcgcagatcaccgccgccgccgccatcggcatggccaacatctacagcctgccggtgtccaccacccatgtactgtcctccggcgtggccgggaccatggtggcgaacaaaagcggcctgcacggcggcaccgtgcgcaacatcctgatggcctgggtgctcaccctgccgacttcgatggcgctgtccgccggcctgttctggctggcctcgcaattcatctgagccgcctcgccggttgaaaaaaacgcctgcttgtccgcaggcgtttttttgccgcgctcccaccgtcgtcatccgcccgcctcggcgggcagcgccgccagcggcaagcgaaccacgaacaacgcgccctccccctggttggccgccgtcaggctaccgcccatgttgcgcaccagatcgtggctgaccgagagacccaggccggtacccttgccctccaccttggtggtgaagaagggttcgaatatccgctccagcaggagcggttcgatcccgccgccgttgtcgtgcacgtgcaattcgacccagcccggttcgcggcaggccacctgctccaggcgaatgcgccggctggccaggccaagattgccgagcagggcatcgcgggcgttggcgagcaggttgatgatcacctgttccagctggtccgcctgccctcgtaccaccatccgctgcgtcggcgccgggcactccacctcgatggcgtgctgacgcagcccctcgccgagcaggcccagggcgccttcgaaggcggtataggggtcgaacggcagcgcctccagcgccgacttgcggctgaacacgccgaggtggctgaccaggcggtcgacgcgcaggacctgggcatccatgcgctccagtttctcgcccaggtagtcgccgtcgaggccgacgctgttcatccgctggcgcatgttgaagagggtcatgcgcagcacgtgcagcggctgcttcacctcgtgggcgaggccgctgaccatctcccccaggctggccatcttggcgccttgcgccagttgctgctgggcccgacgcaccggcgtgttgtcgcgtcccaccgcctgtacctcgcacaattcgccccgggcgtcgaacaacggtcgctcggcccacaccagccagagaaaacgttgccccggcaggttgaagcgcagttccggcacctcgctggcgccctcccgcggcgaacccagcagacgcgcgcgcaaggcgctggcgtcttccgccgccagccactcgtcgagccggcgaccgaccaggcgctccgggctggtcgcgaggctatcggcgaaggtccggttcacgtaggtcagcaccaggtcggcggtatagcgacagatcagcgccggcgaatcctccaccaggacccggtagcgttcctcgctctcggcgatacgctgtgccgccaggtgctgctcggtcacgtccagccacaggcccaccgcctcgctgggcaggccctgggcatcgcgcagcagcttggcttcgtcgtagagccagtgccagttgccctggccatcggcgaggcgatagcgggtcttcacccggccctcgcaaagcaactcgcggccacgggcgaaaaaggcctccaggtcgtccggatgcacccgttcggcgagcgcctgccaactctgtccctgcaagtcgaggccgagcaggttgctcgcgctttcgctgtagaactccggcaccaggtgcccctgctcgacccgctggacgtagatcaccaccggcgcgctgtcgatcaggctgcgcagccgcgcgtgggccgcctgtgcccgttcctcctggcgccggccttcgctgatgtcgagcagcacgccggacagccccagcgcgctgccgcgccccagcggtcgaccctcgatgcgcagccagcggcgctcgccgcggctatccggctgacgcaggcaaaggtcctgggccagcgcctggccgctgcgcaggctggcacgcaggcgcaggccgagttcgtcggcgtccgccggttgcagcaggccctgcaggtgttccagcggcacccgacgatactcgccggtcaaccccaggctgtcgtgcaaggccggcgccagttcgaagagttcctgctccgcccagtaacgccaccagccgccgccgatcatctcctgcaacagccccagcttgcgcgaactgtcgtgctgctcgtggagttcgcagcggtccgccacctggttcgccagcagttccgcgaggtattgccagtcctgcggcgcgggcccctgggcgagctgctccagcgacatcggccgcaccagcaatgcccccaggcggccaccgcgcatcgccgccggcaccaggtagagcgcgtcctcgccgatctgccggagcagcgtcgaggcgccttcgccacggcgtagcaagcgcgcgcccgccccttcgcgcaggtcgtcgtcggcgagttgcagggtcggtcgcagcaaactgtcgctgccaggccgcacatgactggcgaagaccgtgcagaaacccttgccgtcgcccagcagcagggcgatagcctgcatctggaacgcgccggagagcgattcgagaatctcctggaccgcctccgccaggtgtccgtgggagacatggcgcagacgcgaaaggatcagcttgcccaggctcaggctctgcaactggtgctgctggttgtcggactgccagttgaggtcggagatgtccatgcccagcagcagcgagcgtcccaggccgtcgagcggctgcatcggctggaaacgacaggtcaatggcgcggcggcatcgctgcgcagcgtcaggtcgagacgctcgccccggcgcaggccggccagcgtcggcgcaccgggggcgcgccgctccagatactcggcgaaaggccgcggctgttcgccaagcccatgggcgcactgcagacgatacgcctgccgcccgccgacccggatcacgcggtcctgttcgtccatctcgaaacacaggtcccaactcctcagcgaagcgctccagagggcggggccttcctgcgaaaagggttccggcctctcggcctcggcggacgacgagcgggaaaattcgaacatgcgaccacctcacagcaacaggttggcactcgccttcagcgtctgcggcaggttgggaatcgcgccgatgccggggaagctcagcacggggatgatcgccttgcccggatcgccgtacgggtactgcacgcagacctcgatccgcgacgtggcgctgacgtagtcggcgtactggccattgccggcacagggctggaggttcgcccgccaggccgccggcatccagtccaggcgcgcgagcaactcgtccctggcacgggcttcggcgaggctctcgtagcccgcatcggagggatcgacagcgatcgccgcacgggcccccacggcagcggcatcgttgaacgactgcaacatgagcaaaggaatgctgtagctgatcagaccgtagaccagcgcgaaaaacagcaggaagatcgctgtgaattcgatggcgacggcgccgtgctggcgtcgccgggaagcttttccgagcatgagctgacatccccgatccgcatccttaatactagtcgtcattcgctccgccaacgttactgaaaaggtattaatccagatgtcgaaaaaaggctgaagaacaggatggagcaattagcactggccttgtgggcaagcgtttgcggatatcaggacatcaaacgtttgcgcgtctccaactggcttatcctgggcggatttcttatttcctttgtttatttatatgtgaaagagtcaagcctgaccggtgctacggttaatatggcaatgaccgcactttttataggcgtctgcctcagccttcccggctaccttctcggcaggctcggcgctgccgacgtcaagtacctggccgcactggggctggccagcgacccacttacggtgctctatagcctggccttcggctgcctgctgtgcatcgcgctattcatcctcgtaaagttattcaaacgttcggtagaaaagtccgcaatgaatgaagaagttcgccttcgaagggcactgtcaaaaaacaagtcattcccttttatattcgccatgagcgccggccttttggcacatctgattatcagtaaaattatctgagtaaacttgcggaagacctcacttagcgactatatgcttatggctaataccattcggtatggctgcattccaatgcacgtcccctgttaaaaacaaaataagcaaatggagcgtatgaccatggacaaaccggcctcgcggcatttcagcgtcttgatcatcgatgatgaaccccaggtgacctcggaactccgcgaactgctggaaaacagtggctaccgttgcgtaaccagcacccaccgggagtcggcgatcgccagcttccaggccgacccgaacatcggcctggtcatctgcgacctctacctggggcaggacaacggtatccgcctgatcgagagcctcaaggaagtcgccggcaacggcaggttcttcgaatcgatcatcctcaccggtcacgatggccgccaggaagtgatcgaggccatgcgggtcggcgccgccgactactaccagaaaccggtggcgccgcaggaactgctgcatggcctcgaacgcctggagaaccgcctgcacgagcgcgtccgcagccagttgagcctgagccacgtcaaccagcgcctggaatacctcgccgaatcgctgaactcgatctaccgcgacatccacaagatcaagtacgaggtacacggcaacagccagccgagtgccctcaagagcgaagacagccagccgtccgcgccgtcggcgtcggtcgcggaaagccaggtgtccccgagcaatccgctgttcggcaagctgtcgccccgccagcaggcggtggcgcggctggtgagcaagggcctgaccaactaccagatagcctacgagctgggcatcaccgagaacaccgtgaagctgtacgtctcccaggtgctgcgcctgatgcatatgcacaaccgcacccagttggcgctggccctgtcgcctgcggcgatgcagcagggcagcggagcggtggtgcactgacaggcgcgatggcccggcgggcctgctagatcagcagttccgccctgccgacatcgaccttcagaatctccgcgtcgatgtatccaagttgtacccccagcaagggcaggaccagattcaggatcggcgtcagcagcccatcgaccagaggtgccaccacggaattcacgatgaggtcggtgagcgccgtcgagccgcacagcaaaggcaagcacagtccgagcaccacgggattgacgttgatgctggttttcagggtactggcgagaaagccgctttccggcaacctgcggctctggacgagatcggaaccgtcggctttcacgttgaatcgcgtatcgcccgagctgccggcgatcgaggtatcgagcttgagatccaatcgcaccaagccgccaagcaccagaatcgagccgacctgatcgatgttggccggactgccgatctttatcgtcgctccgctgcttctccagccgaagtccaacgcggtatccgggcgggtacaggccatgcttttcagccagacggctcccgacgcgccttcgatggccagttgcagtttcgtggtggcgagaatggacaggaacccggaatcgatgtccgccgtaagtcgtacctgggactggcgcacctccgtgcgccaggcaccgctctcatcctgccctggcggcccggagacgatcctcttcggctctacgaccgtgagccgtgcattggccaatccagggatacccaggttcacggcgaccgcggaattcttgttggcgacctgggcaaccgccatgatgagatccagcgcattgatcgccgtatccagctgcgacatgctgttcacctcgccggcgctcagccccagcaagtctcccagtttcaacgtggccgactttacccccaccaattgcgctctcagggcctcgaccgaggctacgccgttcttcgccaggacgttcacgctggcggcgagtacctgctgcaagccgacgttggtattcaacaactgttcgatggtccccaggctggtatcgaccccgatcaagcccattccatccgcgccgagaatgtccagcacactgagcttcgcgtcggcgataccgttgtaggccgccgccgagagatcgatgtgggtgcccagcaatccgctcaggatggggttgagcaacgccgattggccactgttcacgctcgccagccccgtgcctgcggaaatcgtggcgttcggcaggcgtcgcgccacggcctctgcgcggagatcgacgttggcattgccgccgccgaacagtcccccgaggttggcgaccaggctgccgggaacgctcttggtcacctcgacatgcaccgcctcgttggcggcagccgcgttcgacgcgctggctatgaaactgcgcaggccgccggcactcagcacgccgccgacctccgccgacaggctggagccggcggcgtccgcatcgaacccgttgagcatcgcgctggccttggcgaaagacgtcgcctgggcagaactctggtcgccgcacaaggctccctgggaggcactctccagcgccgccacgtccgccactcgctgcaggttgcgctgctccaggtagagccgcccggtatccaccaccagcaacaggcagatcaaggccagcagcagggtggtcgccgccaggatgccgatcgccccgcgctgtcttgcaggccatccgttcatgccctgcccctccgccaggaaccgtcagttcttgctctcgccgaagccgcgatcttccagcaggtactcgggaatctcgtgctcatagcttttcaggtagcgctggtaggcacgctggcgctcggcggcggtcgcgctttgccgaaccgggctggcggcccggccgctcgcctggatggccagccaggcgcgggtggcggtctgcggttcggccgtcgctggcgcggcaggacggaccgccggcgtgtccgcggcccaggccgtgccggacaggagcagcaagacgccgaacaggattcgctcgtgcatggttcacctctccggcgccggctcagggcgcctcgttggccatcgcggtatgcatattcgcctccgccggcagttccgccagcgggtcgtcgcttgccggcgccgcgccgggtgtcggtacggcaccccagctgcgcgcccgcgcctcggccgcgcggatgtcccgggcatccagctgcaaacgctcgatcaggcgctgcgcatcttcccggtcgccttgcaggtacagcaggccgagcaggttggtcgccggcagcttgccaccctgctgcaactccagcgcagtgatgaattcgaagcgcgcgccgacacggtcgccgcgcttgagcagggcgacccccaggtcgttgcggaagcggctctcggtcggccgcaggcgcgccgcctcgcgcagctcgaggaccgcccgggcgctgtcgccattgcgcagggcgagcaggccgaggccgtggtgcgcctcgggtgccttgcaggtttccagcagggcctggtactcggccctggcccgcgggtcgccgatccggcgcaggatcagcgccctttcctcgcgcacgtcgagcaaccccggcggcatgctttccaggttggccagggccgcatgcaggcggccctcgcggatcatgtcgcggaccatgttcatctgcagttcctgctcctggccgagctgctgcgaacactcccgtgggccgtcccgccccggcagcgcggcgcaaccgccgagcagggcggcgcacaggccgatgccgatcagtgctttcatcccagtcctcccaaggccttggtgatggcaatgacgcccggaccggcgaggacgatcagcagcgccgggaacagcagcaccatcatcaccaggctcatcttcgccgacagcttgccgatgcgttcctgcaaggtggtcaggcgccggtcttcgaacagttgcttgagcgtcagcagggtgctgcgcgcactgccgccctggcgcaacatctgccgtagcacgccgcagcagtcgttcagcgggtccacctgcaggcgccgggcaagcgcctccagctcttccgccaggtcgatgccgttgtcggcacgggtcagcgccaggtccagctcgcgggccagttgcggggtgatcccgcggccttccaggcagaccacgcgcagcgtctgctccacggtcaggccggcgtcgaagaggatgcggatcagttgcacgaacaggatcatctcgtcggcgatcagcgcccggcgcgccttggcgaagtgcttgagcacctgcttgggcaggaggaaaccgatgccggcggcgaacagcagcggcaccgcgtaggacgcctcgctctcggcgcgcagcagcttgaccagcaagaccaggagaacgaacagcagcggcgtgaggaacaccgagatcaggtacagggtccggtagcgactctcgtgccagccggcctgttgcagcaactggcgggcctcgctgtccatcagttgcaggcgccgcacccagaagctgtcgtccatccgctcggtcatgccggccagccacctggtcgagccgccagggttggccagcgctcccaggcgcctctcgatcaggcgctgctcgcggctgccgttgcgcgcctggagcaacagcaacaaggcaccgccgaccgccatcaggagcgccgcgaaaatcagccactgtgcctgcatggccacctcctagacgctcttgagcatgcgccacagcgcatagcagccgagcagttgcagcccgagcgaggccagcagcaggaaacgcccggtgccgtcggcccacatgttcagcagatagcccgggttgctcgccaggatgtagccgcccagggcgctcggcacgccggccaggacataggcgctgatccgtgtctcgccggtcatcgcgtgcaactgccggctgagcttctcgcgctcgtggatgagcttgacgatgctgtccagcaggtcgctggtattgccgccataacggtggttgaccgagacgcccagggcgaggatgcgcagctcctcaacctcgtagagttcggcgacttcctgcaacgcctccggcaggtggatgccgagaagcacgtggttgcgcgccagggtgaagatatcgcgcagcggctcctcggcattctccactgcctgcattagcgcgtcgcccagcgtgcgcccggcgtgcaggctgcgcactacctggtcgaggaaacgtggcatctgccggatcattcgcttcaggcggcgctggtagagcatgcccagggcgacgcggcaggacagcgccgccagtagcaggccgcctagcgcgccgacgatgccgaacaggcgtaatccgctccagaccagcagcagcgcaagcactgccgccccgaacaaccacggacgcgggcgctggataccggcgcgacgcatctggcgagccagccagtgactgctgcgcggccgcaccgcgaccgcctcctggcgtcccagcagccgttcaaccaccagttcgttgcgcccggcgcgccagcccatgaacgccagggccagcgcggcgaaagccagcacgccgctgaacagcaccagcagttgcgcgccgttcacagcagcgcctggcggaatttctgcccgaccggcgcggcctggcggacgaactgcccgctaccgcgccggtcgagactgaacagggtattggtgacgtacacgccgtcgcgcacctccagcacctccagcacttcgctgatgcaacgccgaccgctggccaggcgggtgatctgcaccaccacgtccagcgcggcgcagatcatcaggcgcaaggtctgctccggcagcctgttgccggtcaggccgaccagcatctccatgcgcagcagcgaatccatcgccgagttggcgtgcaccgtgctcatcgagccgtcgtggccggtgttcatcgcctgcagcacgtcgagcacctcgacgccgcggatctcgccgaggatgatccggtccgggcgcatccgcagggcgttgcggatcaggtcgcgggcggtcacctcgccgtagccctcggcgttcggcggacgggtctccaggcgcaccacgtggtcgtggccgagttgcagctcggcggtgtcctcgatggtgacgatccgctcgcgttcgtcgatgaagccgctgatgacgttgagcaaggtggtcttgccggtgccggtgccgccgctgatgaggatgttgcagcggcgcgagaccgcctggcggaggaactcgagcaaggcttcgtcgacgctctggtaggccagcaggtcggcactgcgcagcagctcctggctgaacttgcggatcgagatgcacggcccgtccagcgccactgggggaatgatcgcgttgacccggctgccgtccggcaggcgcgcgtcgaccatcgggctggactcgtccaggcgtcggccgaggggcgcgaggatacgctggatcacccgcagcacatggtggtcgtcgatgaagcgcaggtcgctctggtagagccgcccttcccgctcgacgaacacccggcccggcccgttgacgaggatttccgagacgccgggatcgcgcaggaggatctccagcgggccgaagccggtgagttcgtcgaccacctcttcggccaggcggtccagttcgtagcgggagatcgccagttgatggcgcgagccgtattcgcagaccttttccgagacgtactggaccacggcggagcgcgcgccctccagcaggttcatgccgtcttcgtcgatctcgtcgatgatgtagcggtgcaggcgcagcttcagcgcctggatgtcctgctcctggcggtagtggaaggcaccgccgtcaggacgcgcgccgaatcccgtgctcatagcagcgccgccttggcccggccgagccaggacagcagcgaacggcgctcgccgcgtgtcacgcacaggctgtccgccagttgccgcagcttggccgccaatgggtcgcgcggcgccacctcgaacaggctcttgccgaggttcttcgcgcgcaggcgcgattccggggacaacggcaggacaccgaacagatcgaggtcgaacatccggctcagggcctgctggtccggcgccacattgggcaggtagcgctcgatcagcaactcgatggagggcaacggcaggttgcgctcgcgcaggcggcgcaggcgctccaggcccttcttgcaggacggtacgctctggtcgaccatccacagcacgcggttggcctgcaccagcaactggttgctcagctcgccctcgggcagcccggtgaggttgaccaccacatggctgaacgccccgcgcaggttgcccagcaacagatagagttcggcggtggtgactcgctccagcacgccgggctcgtcggtcaggctgagtatccgcaggccgctgtcgaggcgggtgaaggcgctgtcgatcagggtctggtcgaggcgccgcaggttgcgcaaggcatcgctgaaggtgaaggccgagtccaggccgaggatcgccagcgcctcgccggtgggctggccgacgtccagcagcaggacctggttcggcgtctgctcctgcaacgccttggccaggtgcaaggcgacgaaggcgccgtcggcgtccggtcgggcgctgaccagggtcagcagctcgccctggcgcgccgcgctcaccggcacgctgggcaggcgtccgccgaggcgccggatcagcccggtcagctcgctggcgcgggcgccgtaggtgatgaagtcgcgcgcgccggcgcgcatcgccgccagcaccaactggttgtccaggccgtcgccgatggccaccaccgagagcatcggccgcgccgataccaatccctcgaccagcgcgccctgggacaccaggttgcttttgccgaggctgatgaacagcaccccggcggcggtgacgtcgagcagcgccagcagctcctccaggctggcgctgcctgccggaaccacctggccggcggacgccaggctgttctgcaaccagtcgagttcgccgggatgctgggtcagcgccacgaagttctggttcatgcgcgcctcctaatccgacagaccggtgtcgttctgctggccgtcgtactcgccgcgctcgaggaagtacaggcgcgagaaccccggatcgtagtgccgcaggccctcgccgggcaggtccggcaactgtgcgtcggcggccagcggctggaccaggtgcggggtgacgatcatcagcagctcgcggtcgtccttgtccagcttggttgagcggaagaacgcaccgaggatcgggatgtcgcccagccagggaaacttgtcgacgttgctcaccgagttgctgctggtcagcccgctgatcacgaagctctcgccgtcggccagcatcacgctggtgtcggtgcgccggacgcgcagtgccggcaccgccaccccgccgctctggatgccggcgctgtagtccagttcgctgacctccggcgccaccttgagagcgatgcggcggttgttcatcaccgtcggggtgagggtcaggcggatgccgaactccttgtattcgatggtgacgttgtcgttggtgccgttcggcaccgggatcggaaactcgccgccggcgaggaacgacgcgctctgcccgctcatcgccaccaggctcgggcgcgccagggtataggcgaagccgctgccctccagggcattcatgaagctcaaccacttgccgccgccgaagatcaggttgaatcccgagctgccggtgccgaaggtgccgcccaggccgctgccgtcggcattgaccttgatatcgccgaggctgcccggcgcaccgagcacccagaggttaccgccgcggcggacgaacgaggtgctggcctgcttcagcttgctgcggctgacctcgacgaagcggatatcggtctgcacctggttcggcagctcctccacggcgccgacggtgaacgctggagcaccgcgggtatcgacgctaccgcgtccctcgacctccaccaggctgcgcaacggctcgggactgcagccggtccagatcagcaggctggtggagccctgttccttgccggtgaccaggaagccgcgacgatccagcaactgtacgtcggcgatcttcggatcgccgatggccagccgttcgatcggcaccgccaggcgcaggtcacgctgttgtccctggacgacgtcgacccgcggcgcctgcgccagcaactcgatgcagccctgcggcaaagccagtgccggcagcgccaacgccacccccagcagccctcccagccagcgcgacacgcctatcccggtgctccgatgcatatgccggctcccctcaaggcacttcatgggtcatggcgctgccacggtagaccgtgaccccgttggccaccggcacgcgcggagccgcgctgcgcacgctcggcgccgtcggtttgcggcgctccagcagttggtcgagactcagcgccgcgctcggcgcgcccagcgacgcttgcagcagcgcgccttcctgctccctgcggtagagttcttcgtccttgctgcggatggccaggcgcagcgaaccggcctggctcgccagcatcagccgcgccacgccgtcctccggtaccgccagcaccgcggtacgcggcggacgcgggtccttttcctggttcgagcggtcctgtccatcgctgcccacggcgatccgctcgccgtaggtcagtacccggacgccgggcaacaccagttgcgccagcggggtcgattcgccgtcccgctcgtcacgcacgaagagcatcacgtcgacatagtcgccgggcaggacgaagccgccgccgccgaccacttcgtccacagcaatcgccatcgcccgctcgtccggacggatggtccgggccagcggaccgccgggttcgagggtcgcggcggaaagaatgctgccggccggcaccgcgacccagacccgcttgccgagcaacgcctcgggcctgtcgtagctaccgaccggtgcggtccgcaacagctcgacgctcaggtcgtccttgccgatcaccgccagcgccgggagatcgcgactggccaccagcaccggcttgcgttcgagcttttccagcgaagcgtccaccgtcgccgaagccggcgccacggatggagcgtgcgcgttcgatggcgcgcggccgatggatacgccgaggtatccgagcaacaccgcaccgagcagcagcaggccggccagggccatcagcaccttgctattcatgggcagacccctgctatgcgtccggacaggtcgatgaacggaaaatcaccggcgatcgccgatgaacgaaaaagaaaaagtggcgtcttgctgtccgtgtcatggccatactccgggactggctttccatggcaggtacattgggttatcgactggagacagtcgttattcaagaaccaaagttcataacttcgaccatgcggcgataggcctgaatctagacttgggataatcaatgtcaatttgtcattagatgtagtccaagccttgtaactcgccatataaccttgcgactaatccactcctactaatgccatttagttgttgcaaaacgccatcatcggcctagcctcagcgtggaggcagggctctgtctcggtgattgccgcgttcgaggagcaaacaagaatgaagaacctgactctgctcgtgtattgcaaacttcgcgcattcctggcggacgaagaaggggcaaatgccatcgaatacgcggttatcgcaggtttgatcgcggtggctctgattgccgtattgagtcccacggacagtggtatcgtcggcgggctgaaagccttcttcgacggagtcggcgaaaaagtcggcgggctggctccgacagcgaactgacgcgagcgctttcccggtcgcttcccatagtggcgccattttcatggcgccactattttgcctttataatggcactgtgctacaaagcctgccgttcaggcgctggatcatggctttcccccgcaagctccctacctggtggcctgggctccccgcccttcttgaggcttttgccaggacgcatcgctcatgcttcgctcgctgtcgtttgccaagaaaatccttctcgccgccgcattggtggtggttttcgccttcacctgcttcattctctacaacgattaccgacagcgcgaggccgtgcgcacggacacggaaaactacctcggggaaatcggcaccctgaccgccagcaacatccagagctggctggaaggccgcatgcacctggtggaaggcctggcctcgcaactggcgctgctcgaccagcccgacgaggcgaatatcgcaaggcaactggaacagcccgtcttcagccgcaatttcgcgtcggtctatcttggcgaggcggccagcggcgccttcaccatgcgcccctacgacgccatgccggaaggttacgacccacgtacccgcgcctggtacaaggacgcgctggtggccgaccggcttatcgtcaccgaacccttcgtcgatgccggcaccggcgagcagatcctcgccatgtcgctgccggtgcggcacgccggtcaactgctgggcgtcgccgccggcgacatgaagctggagaccctgaccgcgatcctcaattccctgaagttcgatggtgccggctacgccttcctggtcagcgacgccggcaagatcctcctccaccccgactccgggctggtcctgaagaccctcgccgaagcctatcccaagggcgcaccgaacatcgaccccggggtccacgaggtggaactcgacggccgcagccagttcgtttccttcaccccggtgaagggactgcccggcgtgacctggtacgtcgccctggtcctcgaccgcgacaccgcctattcgatgctcagcgaattccgcacttcggcgatcgtcgccacgctgatcgcggtggtcggcatcatgcttctcctcggcatgctgatccgcgtactgatgcaaccgctcaccgacatgggccgcgccatgcaggacatcgcccagggcgagggcgacctgaccaagcgcctgaaggtcaccagcaaagatgaattcggtacgttggccaatgccttcaaccgcttcgtcgagcgtatccacgaatcgatccgcgaggtcgccggcaccgcccgtcaactgcacgacgtggcgcaactggtggtgaacgcctcgaactcctcgatggccaactccgacgagcagtccaaccgcaccaacagcgtcgccgcggcgatcaacgaactcggcgccgccgcccaggaaatcgcccgcaacgccgccgatgcctcgcaccatgcgtccgacgccaaccaccaggccgaagacggcaagcaggtggtcgagcagaccatccgcgcgatgaacgagctttccgagaagatcagcgcctcctgcgccaacatcgaggccctcaacagccgcacggtgaacatcggccagatcctcgaagtgatcaagggcatctccgagcagaccaacctgcttgccctcaacgccgccatcgaagccgcccgcgccggcgaggccggacgcggcttcgcggtggtcgccgacgaggtgcgcaacctggcccatcgcgcccaggagtcggcccagcagatccagaagatgatcgaagagctgcaagtcggcgcccgcgaggcggtggccaccatgaccgaaagccagcgttacagcctggagagcgtggagatcgccaaccgtgccggcgaacgcctgggcagcgtgaccagccggatcggcgagatcgacagcatgaaccagtcggtggccaccgccaccgaggaacagaccgcggtggtcgactcgctgaacatggacatcaccgagatcaacaccctcaaccaggaaggcgtggagaacctccaggccaccctgcgcgcctgcggcgagctggaagcccaggccgggcgcctgcggcacctggtggacagcttcaagatctgagcccgtccgtcccacaggccagctaaccgcgaagcggttagtcggcgatcatccagcccccatgaaaaaggcgcccgcgggcgcctttttcatggcctggcgctcagcgccgcttcttcccgcccatcaacgagccgagcaggccacgcaccagctcccggctcaactggttggccgcctggcgcatggcgctcttcaccgtcgaattggacagcaggctgccgagaatctgcccggccatgccgccgacgccggacgcgctttcctgctgtgcgggcgcctggccctggacctcgggcttggcgtccgccttgctcgccagcacctcgtaggccgactcgcgatcgatcggctggtcgtagcgccccttcaacggcgaccgctggaccagttcggcgcgctcgctgtcgctcagcgggccgatccgcgaatagggcggcgccaccgcgacgcgctggaccatggccggcgtgcccttttcctccagggtgccgaccaacgcctcgccgatacccagttcggtcagcacccccagggtgtcgaacgccgggttcgggcggaaaccgtcggccaccgcgcgcagcgatttctgctccttggcggtgaaggcgcgcaggccatgctggatacgcaggccgagctgggccaggacatcgtccggcaggtcgcccggcgactgggtgacgaagtacaccccgacgcctttcgagcggatcagccggaccacctgttccaggcggtcgcgcaaggctttcggcgtgccgttgaacagcaggtgggcctcgtcgaagaacagtgccagcaccggcttgtcggcatcgccgcgctccggcagttgctcgaacagctcggccaacagccagagcaggaaagtcgcgtagaccttcggcgcctcgtgcaccaggcggctggcgtcgagcaggtggatgcgcccgcgcccgtccggctcggggcggaggatgtcttccagttgcagggcaggctcgccgaagaaggcctcggcgccctgctgctccagagtggccaggcggcgcagcagcgcctgcccggaagcgccagtgaacagcgcccggtcctcgccaaggatttccggattgtccttcagatggttgagcagcgccttcaggtccttcaggtcgagcagcagcaggccttcccggtcggccacctggaaggcggcgaacagcgcggcctgctggctatcggtcaactccaggaggttggccagcagcagcgggcccatctcgctgatggtggtgcgcaacgggtggccggtcttcccggcgatgtcccagagcgtggtcgggtaggccttcggctggtagttcagccacggcatgctggcgatacgttcggcgaccttgccctgcgggttgcccggcgcggcgatgccgcacaggtcgcccttgatgtcggcggcgaacaccgcgacaccggcatcgctgaaggattcggcgaggtgctgcaaggtcaccgtcttgccggtaccggtggcgccggcgatcaatccatgacggttggccaggcgccaggcctgtcctaccggctggccatcggggccagcgccgatcaacaactcattcgcttgcgacatccattcatcctcgggactaaagctccggcacgctgtgccgacagtaagggaaagctcttgtgcaacggggcttccagcggaacccacgtaccaatatgcgcgggttcccgcgaagggcgtcgggccagcgcatcgacccgatctggccgtccagcttcagcgaagaccttcgggccttgctgagacaggaaaaatcgccatcgtatccgtatcacgcattcttcggagccacccagggaaccgtggcttcgtggcacaaggccgtgcctgggtcgacggactacccacccgcgcgacccgcccgacgctgcaaggcgtacggaaagcccctgcgcccgcggaacggtcgcaggggtctggtcaaagactggcgctacatactcctggacgcaatacaacatgatcaaaagtctgaagttcagccacaagatcctcctcgcggcctccctcgtggtgttcgccgctttcgcactgttcaccctctacaacgattacctgcagcgcaacgcgatccgcgaggacctcgaaagctacctgcgggaaatgggtgacgtgacttccagcaacattcagaactggctcggcggccgtctgctgctggtcgagcagaccgcccagaccctggcccgcgaccacagcccggaaaccgtcagcgccctgctcgaacagccggccctgacctcgaccttcagcttcacctacctcggccagcaggacggcgtcttcaccatgcgtccggacagcccgatgccggccggctacgatccgcgcagccggccctggtacaaggacgccgtggcggccggcggcctgaccctgaccgaaccctacgtcgacgccgccacccaggaattgatcatcaccgcggcgacaccggtgaaggccgctggcaacaccctcggcgtggtaggcggcgacctcagcctgaagaccctggtgcagatcatcaattcgctggacttcagcggcatgggctacgccttcctggtcagcggcgacggcaagatcctggtgcacccggacaaagagcaggtgatgaagaccctgagcgaggtctacccgcagaacacgccgaagatcgccaccggtttcagcgaggccgaattgcacgggcatacccgcatcctcgcctttacccctatcaagggcctgccttcggtgacctggtacctggcgctgtccatcgacaaggacaaggcctacgccatgctcagcaagttccgcgtctcggccatcgccgccgcgctgatctccatcgtcgccatcctggtcctgctcggcctgctgatccgcctgctgatgcagccgctgcacctgatgggccgtgccatgcaggacatcgcccagggcgagggcgacctgaccaagcgcctcgccgtgaccagccgcgatgaattcggcgtgctcggcgatgccttcaaccagttcgtcgagcgtatccatcgctcgatccgggaagtcgccgggaccgcgcacaaactgcacgacgtctcgcaactggtggtgaacgcctcgaactcttcgatggccaactccgacgagcagtccaaccgcaccaacagcgtcgccgcggcgatcaacgaactcggcgccgccgcccaggaaatcgcccgcaacgccgccgatgcctcgcaccatgcgtccgacgccaaccaccaggccgaggacggcaaacaggtggtcgagcagaccatccgcgcgatgaacgagctttccgagaaaatcagcgcctcctgcgccaacatcgaggccctcaacagccgcacggtgaacatcggccagatcctcgaagtgatcaagggcatctccgagcagaccaacctgctcgccctcaacgccgccatcgaagccgcgcgcgccggcgaggccggacgcggcttcgcagtggtcgccgacgaggtgcgcaacctggcccatcgcgcccaggagtcggcgctgcagatccagaagatgatcgaagagctgcaagtcggcgcccgcgaggcggtggccaccatgaccgagagccagcgctacagcctggagagcgtggagatcgccaaccgtgccggcgaaagcctgagcagcgtgacccggcggatcggcgagatcgacgggatgaaccagtcggtggccaccgccaccgaggagcagaccgcggtggtcgactcgctgaacatggacatcaccgagatcaacaccctcaaccaggaaggcgtggagaacctccaggccaccctgcgcgcctgtggcgagctggaaacccaggccgggcgcctgcgccaactggtggacagcttcaagatctgagaccggccggtctcgtcgccgaaccggcggacaaccgcgatgcggttatccgccctgccgacgaaaagcgcccacgggcgctttttttcgttctccaggtcgcattcggtgaaaccattcatccgttgcgctaaagcttccggacttgccgccgacagacacggcaagccttgcagttgcgatccaactggggctgttcacgacagcgcgcccgcgcctcccggatgcaagaaaccatgatcaaaagtctcaagttcagccacaagatcctgctcgccgccgcgctggtggtgatcgcgaccttctccctgttcaccctctacaacgactccctgcagcgtgcctcgatccgcgaggacctggaggactacctgcacgaaatgggcgagatcaccgccagcaacgtgcagaactggctgagcgggcgcatcctgctgatcgagaacctggcccagaccctggcccgcgaccacagcccggagaccacccaggccctgctggaacagccgctgctgggctcgaccttcctcttcacctacctggggcagaccgacggcacctacaccgcgcgccccaccagcgacctgccggccgactacgacccgcgccgccgcccctggtacaacgccgccaccagcgccggccagaccaccctcaccgaaccctacatggagccggccatccacgagctggtactgaccatcgccagcccggcgcgccagggcggccagccattcggcgtggtcggcggcgacctcagcctgcagacggtggtgaagatcatcaactcgctggacttcggcggcatgggctacgccttcctggtcagcggcgacggcaagatcctcgtccatccggacaaggaccaagtcatgaagagcctcagcgacgtctacccacgcaacacgccgaagatcggcagcggcttcagcgaggccgagctgcacggcaacacccggatcctcagtttctctccggtcaagggcctgtccggcctggactggtacatcggcatctcggtggacaaggacaaggcctatgccatgctcaccaagctgcgtacctcggcgatcgtcgccgcgctgatcgcggtggtcgccatcgtcctcctcctcggcatgctgatccgcgtactgatgcagccgctcaccgacatgggccgcgccatgcaggacatcgcccagggcgaaggcgacctgaccaagcgcctgaaggtcaccagcaacgatgagttcggggccctggccacttccttcaaccgcttcgtcgagcgtatccacgaatcgatccgcgaggtcgccggcaccgctcgccaactgcacgacgtggcgcaactggtggtgaacgcctcgaactcctcgatggccaactccgacgagcagtccaaccgcaccaacagcgtcgccgcggcgatcaacgaactcggcgccgccgcccaggaaatcgcccgcaacgccgccgatgcctcgcaccatgcgtccgacgccaaccaccaggccgaggacggcaaacaggtggtcgagcagaccatccgcgcgatgaacgagctttccgagaagatcagcgcctcctgcgccaacatcgaggccctcaacagccgcacggtgaacatcggccagatcctcgaagtgatcaagggcatctccgagcagaccaacctgctcgccctcaacgccgccatcgaagccgcccgcgccggcgaggccggacgcggcttcgcggtggtcgccgacgaggtgcgcaacctggcccaccgcgcccaggagtcggcccagcagatccagaagatgatcgaggaactgcagatcggcgcccaggaagcggtcagtaccatgaccgagagtcagcgctacagccttgaaagcgtggagatcgccaaccgtgccggcgaacgcctgagcagcgtcaccggacggatcgccgagatcgacgggatgaaccagtcggtggccaccgccaccgaggaacagaccgcggtggtcgattcgctgaacatggacatcaccgagatcaacaccctcaaccaggaaggcgtggagaacctccaggccaccctgcgcgcctgcggcgagctggaaacccaggccgggcgcctgcgccagctggtggacagcttcaagatctgagcactgcccgagccgtagccgaaccggcggataatcgcgccgcggctatccgccctgcccccggccattcgtagggtgaacaacgccaacggcgttgttcacccttatcctgccaggatgcctcccgaggcatgccttcctctccgcccgctccctctgcgacctattcccgcgctggctgccgcaagcgcgccggctcgcgctttctttcctagacttgaagctacccacgactcccgcacaccgttcgaacgactgccggtgccggtggtccactgagtggcagaaggaacaagctcaacggaggaaggcccatcgtgcacatcgccgatatgaccatgttctacgcgcctgccagcgggggggtacgcacctatctcgaagccaagcatcgccatctctggcactatcccggcattcgccacagcgtgctggttcccggcgccagctaccgccaggcgaacggcatccacgaggtgccggcgccgccgctgccattcggcaatggctaccgcttccctctccgtcgcggcccctggcgcaaggtgctgcgcaatctgcaaccggacctgatcgaggtcggcgacccgtacctcaccgcctgggcggcgctcgacgcgcgacgtcggctggacgtgccggtgatcggcttctaccactccgacctgccgctgctggtgagcaatcgcatgggcgcctggctcggcaccaacgcggacaactacgtcagcaagctgtacggccacttcgaccgggtcctggcccccagccgggtaatggcggaaaagctgatgcgcctgggcgtcgccgacgtgcatgtacaaccgctgggcgtcgacctggtcaccttccatccgagcaaccgcgatccggggctgcgccaggaactcggcctggacgaggaaacccgcctgctggtgttcgccgggcgcggttcgcgggaaaagaacctgccggtactgctcgacgccatccagcgcctcggcgacggctatcacctgttgctggtgggttccaacatgccgacccgggttccgcgcaacaccagcgtggtcgaccatttctgcgacagccgcgaagtcgcccgcctgctggcgagcagcgacgcgctgctgcacgccggtgaccaggagaccttcggcctggtcgcactcgaagcgatggccagcggcattccggtggtggcggtgcgcgccggggcactggcggaaatagtcccggagcgttgcggcgtgctctgcgcaccgaacaacggcgacgccatggcctgcgcggtgcgcgaactgttcagccacgacgtcgagctgcgcggccagcgcgcccgccgtcacgtcgagcgccagcatgcctgggacgcggtggtcgccggtctgctcctgcactaccacgcggtactcggcgacagcgaggcgaggttcccgcgctatggctgaacgcagcctgctgctggtgttgcacgacgtggccccggaaacctggccggactaccggcccttcgtcgaggccgtggacgcgctcggtgaggtccccatgacctggctggtagtgcccgacttccaccatcgcaacccgctggaagccgacgaaaagttctgcaaactgctctcgcggcgggtaacccggggtgacgaactggctctccacggcttctatcactacgatgacgccccaccaccgcgtactccagggcaatacttcatgcgtcgcatctacacctgggagggagagttctatgctctcgaccacgccgaggccaagacccgcctggccgccggcatcgagctgttccgccgccgcggatggccgctgcacggtttcgtcgcgccggcctggctgatgagcgccggcacccgccaggcgctcggcgagagcgggctgcgctacaccagcgacccgtccaacctgtatctgcttccccacctgcaaccgatcgaggcccccggcctggtctggagcgcgcgcagtgcctggcgtcgcggcctctcctgggcgctcagcgagcagcgccgccgggcctggcgcgcagcgccggtgatccgtctcggactccatccggtcgacatgcgccatcgcttttcccgcgaatactggctgcataccctgcgcaccctgctatccgaggggcgccagccgttgaccaagatcgactggctggagcgccacctcgccctggaccgcgcggcatgagtcgaggctggttactgctgttcggtttgatcggtgcctcgctgattccgctggtgctcggcggcagcgacatgttcccgcgcttgcgcgccttcccgctggacagtctgctgctgatgttcggcatgatcgtggtctgctggttcatcaacggcctgcgcctgcgcctgctgctcgccgggcgcgccggcaagctcgggcaattgcagagcgtcggcatcatcatggccagcgaattcgctttctgcgccactccgggcggcagcggcgggccgttgaccctgatggcgctgctggcccggcgcggcctgcgcccggcacagaccagcgcggtgttcgcggtcgaccagttggccgacctgacgttcttcctctgcgccctcggcgcgatcctgatctatgccctcagccattcgctgagcccgaacatggaatcgagcctgatcttcagcgcggtattcctggtcggcctgttcgtcggcgcggtaatgctgatccgctacctgcaccaggtgatccgcttcaacgggcgggttctggcgcggctcggcgtgtcatcgcgcaagcgcctgcactggggccgcaagatcctgcatttccgcattgccctgcacgacagcctgcgcctgccgaaacgacgcctgctggcggtcttccttctcagcagtacgcactggctactgcgcttcagcgtgctcgatctgaccctgcgcggcctgggagtggatatccagtgggcctggaccttcctgatccagatggtctcgctcagcgccggacagctctcgctgatccccggcggcgccggcggcaccgagctgacctcggcggccctgctggcccccatgatcggcaagtcgacggcggcggcggccatcgtcatctggcgagcggtgaccttctatttctacctcgtcgccggcggcccggtgttcgccgtgctcgccggacgcccgctgctgaagaagctgatcagcagtcgcgaggcttcttcctgagcgtatcctcggcgtcagcctcgcccgtctcgctggcgctctcctggatacgccgccagagttcggccgcgccgggaaactcggttccgtcctcgtcgccgagggcgtcgatgtcgtaacggcttgtgcaaccctcgccgagggtcggtggcgggctggcggtgcccgccgacctgggatcgctcatgttcgttcctccgggtgccggccctggccggcattccagggaagccgactcagtcgaacaccaccgtcttgttgccgtgtaccagtacgcggtcttccaggtgatagcgcagtccgcgcgcgagcaccagtttttccacatccttgcccagccgcaccatgtcttcgacgttgtcgcggtgagtgacccgcaccacgtcctgctcgatgatcggaccggcatccagttcctcggtcacgtaatggctggtcgcgccgatcagcttgaccccgcgcttcgacgcctggtgatacggcttggcgccgatgaaggacggcaggaagctgtggtggatgttgatcacctggtgggcgtacttgcggcacaggtccggcggcaggatctgcatgtagcgagccaggacgatgcagtcggcgccatgttcgtcgatcagccgggaaacttcatcgaaggccggctgcttgtcctgcggatcgacgggaacgtggaaatacgggatgccgtgccactcgaccatgctgcgcaggtcgtcgtggttggcgatcacgcagggaatctcgcagtccagttcgccgctgtgccagcggtgcagcagatcggccaggcaatgggactccttgctggccatcagcaccacgcgcttcttcacctcggaatcggtgatccgccattccatggagaattcgcgggcgatcggggcgaaagcctggcggaagccatccaggtcgaacggcagagagtcggcacggatctcgtggcgcatgaagaaccagccgttatcgttgtcggaatgatggctggcttcggtgatccagccattgtaggtggccaggaagttactcaccttggcaacgatcccgaccccgtcgggacaggcgatcaccagccgaaaagtgcgcatgggtatactccagaaacatcgcgaaaggccgccattctagcggcatggcgggaaaagttcagcctcggcgaaggtctttcgacaggctgttgcgcgagagaataaacccgcacaacagggcaatcccgatgcggaattaattactttgaatttcatcgagaaaagttttcatcgcggtttacttacagtttcgccctgactattattgaatctacttacatgcccgccaccgccactcagcacagacaaggtacctgacatgtccctgatcaacgaatatcgcgccacggaagaagccatcaaggaacttcaggagcgcctgaagtccctggaacaagacgacaaactgaaaaaagaactggaattcgaagagaagctgcgcacgctgatgggcacttaccagaagtccctgcgtgacgtgatttccctgctcgatccggacgccaagatcggcaagagcacccgcaccgccaaggcgcctgccggcaagcgcgcgcgcaaggtcaagcagtacaagaacccgcacaccggcgaagtcatcgagaccaagggcggcaaccacaagactttgaaagagtggaaagccaagtggggccccgaggccgtcgagagctgggccaccctgctcggctaaaccagtcagttccacgaagaacgccagcccagtgctggcgtttttcatttccgccggattgtatcggctcctctgcctgcgccctcaagtctccagcgaatagcgttgacgcagttccgcggcgtaatcgcgccaggccgcaagtaccgccggcaatgtgccgccctgctcttgccgacaagcctccagcgccgcctcgaaggccggcaaagtattcggtgcgccgtattcttcatgggacaaacgattgcggcagaagctttcccattgttggcgctcggccacatttaaagtttccgggaaatttcgcgcacgatagcggaagaacaactcctgcaaacgggcatcgtcgaagggccattgttctttggccaattgctccggttcggcaaggcgcagctgttcacaaaggcgtcgatcccgatcgccaataaatccgtcatacaactgttgctcggggtcgtcgctggcggagaaactttcttcgccatatagcgctgtcagtttgtccgcccagacggtttgatgctggcgcaacagctcggctttttgctggcactcatcgagttcgatgccggttcgctggcgatcctcggcgcgcaataccgacagcggcgccaccaccgggcaacgattgacctggatctgcttcagcggcaccggcaactcgccctcggccagttcgtcgcgacgggtatacaggcgcctgcgcaagtcttcggccgacaactccagcagcggcgcgggatcggcgcagaggtcgcagacgatcagagcattgcggttgcgcgggtgccaggccagcggcaggaccaccgagaggaaatggcgctccgcggaaaagcgtccggagacatgcaccagcggctgcagcaggcgcacctggtcgagcaccttgtgcttgctgcgcaactggtagaggtaatcgtacaggcgcggctggcgctgacggatcaggcgggccagggcaatggtggcgcggacatcggaaagcgcgtcgtgggcctgcccatgctccaggccgttcgccgcggtgagcatttccagcttcagcgacagccggccgtccagctgcggccactggatgccctccgggcgcagggcataggcggtacggaccatgtcgatcaggtcccagcggctattgccgccttgccactcgcgggcgtagggatcgaagaagttgcggtacaggctgtagcgcgtcacttcgtcgtcgaagcgcagggagttgtagccggccacgcaggtcgccggctgcgccagttgggcgtgtacccgggtcatgaagtcggcctcggacagcccccgctcggccagccgctggggagtgatgccggtgatcaggcaagccatagggtggggcaggatatcgtcgctgggacggcaatacaggttcatcggctcgccgatctcgttcagcgcctcgtccgtgcggatcccggcgatctgcaacggccggtcgcggcgagggtcgatgccggtggtttcgtagtcgtaccaaaaaatactcgcgttcacggtcattccctttctggcggcaccgggcagtctaccagtgactgccgcgaagctcgcgacccacttcggggatttccaggttttccaacgaactcacggaaagcgccgtaggcacggcccgccagggcgcgtcagtgcgcatatctgccatccgaaccttgcgttgtcccctccgccctcgctagcattccgctcgcacggatgcccgtttcactgacaaggacagcaccatgaacgacaccagcaatccctacgccacccccgccagcgccctgcaaccgacccaggcggtgccgccggtcatcggcgactacgacttccgcatcggcgacgtgatcagcgaagcctgggccaagatcaagggcgtcaaaggcatcctgatcggcgccttcgtggtctacagcgtggtgatccagaccatcaccttcatcctcaccctgctcttcggcggtatcggcctgatgagcgaggccgatcccatcgccttcgcggtcggccagatgatcgccagcctggtcgccacggcggtgggctacccgttcttcaccggcctgaccatgatcggcatccgccgcgccgccgaccagccggcgaccttcaacgaaatgttcaactacttcggcatgctggtgccgctgctgctcaccggcctgctgatgatgctgatggtctacgtcggcttcttcctgctgatcatccccggtctctacctgagcgtcgcctacatgctcgccctgccgctggtggccgagcgcggcctgacgccctggcaggccctggaaacctcgcgcaaggccatcagccgccactggttcaaggtgttcggcctgctgctggtgctgagcctgctgatgctggtgagcatgatcccgctgttcatcggcctgatctggaccggcccgctgttcgtcgtctccatgggtattctctaccgcaccatcttcggcgttcgcccgctgggcaactgaggtgcagaccgggccgtcgcggcggcccggttgcctgatgacgccacgctggctagcatctgactttccccgacacggccccccgatgccaccgaacgcagccgctcgcctcgtcgcgcccgcctcccggccaggcgccgaggtcctcgacacccactaccacgtggaaacgccggaaggcatcgacctgctcctgcgtcccgccggcgtcgtcccccgggccctggcctataccatcgacctctgcatccgcggcctgatcatgctggtgctgatgctcggcctggcgttcctcggcaagctcggcgccggcctcggcctgctgctgaccttcatcatgacctggtggtacatggtcctcttcgaggtgctcaaccagggccgctcgcccggcaagcagatgatgggactgcgcgtcgtccacgacgacggcactccggtgggctgggccgcgtcgctgctgcgcaacctgctgcgcttcgccgacatcctgcccttcggctacgccctcggtctgctctgttgcctgaaccatccggccttcaagcgcctgggcgacatcgccgccggcaccctggtggtctaccgcgaacccgaactgagccggcccagcctgcctgacgtcgagccgcaactgccgcccttccccatgagcctggaagaacagcgcgccttcctcggtttcgccgaacgcggcgcggcgctttcctcggcacgccgcgaggaactggcgggcattctcgccgaaccgctgggcgtcgagccggtacgcgcccaggccgagatcaacggcatcgcccgcggctttctcggcctgcgtcaggagagcgcatgaaacagagcctcttcgaacagcgccaccaggccgcctggcaacgcttcgacaaacgcctcgccttcctcgagaaaggcaagaagctggaaggctccagcgacgacttcgccgccgattaccggcgcctctgccagcaactggcgctggcccaggagcgcggctacagcagtcacctgatcgaccagttgcagcaactggcgatgcgcggccaccagcagttctaccggcaccgcagccacctcggcagccgcatcctcggcttcctgctcgccggcctgccgcgcctggtccgcgaggagtggcgcagcatcgccgtggccagcctgctgttctacggcagcgccctgctcatggggctgctggtctatcactttcccgacctgatctacagcgtggtcagcccggacaaggtcagcgagatggagtctatgtacgccccggaaaccacccgcctgggtccgttgggggcacgcgacaccagcgacgactgggaaatgttcggcttctacatcatgaacaacatcggcatcgcctttcagaccttcgccagcggcgtgctgctgggactcggcagcctgttcttcctgctgttcaatggcctgatgatcggttcggtggccggccacctgacgcagatcggctacgtgcagaccttctggccgttcgtcatcggccacggcgcgttcgaactgaccgccatcaccttcgccggcgccgccggcctcaagctcggctgggcgctgctcgcgccaggtcgcctgacccgcggcgaagccctgcggctggccgcccggcgcagcgtgcaactgatcgccggggtgatcgtgctgttgctgctggcggccttcaccgaggcctattggtcttccatcagtcatttcgagccgcgggtgaagtacgcggtcggcgcggtcctctggctgctggtcggcagctacttcctgttcgccggacggagccgccatgcgcctgactgacgccagcgtggcgatccgcccgcgcagcgcctgggaagcgctcgacctcggcatcctcctggcgcatcgccatgcgcgcctgctgatgggcagctgggcgttgctgaccctgccgctgttcgccgtgctcagcctcctgctgtggcagcatccgaccctggcgatcctgatcttctggtggctcaagccggccttcgaacggctgccgctgtacattctctcgcacgccctgttcggcgatacgccaaccctgaggcaggccctgcgcgcctatcccgccctgctgaggaagcagttgccggccagcctgctgtggcgccgcttcagtccgacgcgcagcttcgacctgccggtcctgcaactggaagggctcgccggggagcctcgcagccagcgcctgatcgtattgtcccagcgcaacgccggcggcgcgacctggctgaccgtggtcggcgtgcacctggaaatggcgctctgggccggcttcgccatgcttctctacctgctgatcccggcgcagaacgagatcgactggaactggcagagcctgctcgacccggaagccggcgagtggctctggctggagcacctgtcgaacctgctctacgtcctggtgctggtagtctgggagccgatctacgtggcctgcggcttcaccctctacctgaaccggcgcaccgaactggaagcctgggacatcgagctggtgttccgccgcctgcgccagcgtctggtcggcagcgcctatgtcctgctgctcggcctgaccgcttcgctggcctggctgcccgccccttccgcctacgccgagccggcggccgccaccagcgccggcgaagccgagctgccgcccgagcaggcccgcctgctgcggcagaaactcaacagcgaacaggccggcaagcagatccgggcgatcgtcgacggcgcgccgttcaagaacagcgagaccgttacgggctggcgcttcggcgacaagaccgagaaaaaggacagccgcaaggaggacgaagagcggctcaaggcattcttcgaggccctggccaactgggtgccgttccgtcacgcggcgcaggtcatcgaagtgctgctctgggcgctgctgttcagcgcggtgttcctgctggtctggcgctaccgtgaatggctgcgcctgttcgtcggcaacctgggcttgccgcaacgggcccgccgcgaagcgccgacggtgatgttcggcctcgatctcagtccggaaagcctgcccgacgacatcgccggcaacgccgaacggctctggaacgagaaaccacgggaagccctcggcctgctctaccgcgggctgctcagccgactgctgcatgactaccgcctgccgttgaagggctctcataccgagggcgaggtcctgcgcctggtcgaaggactggagcaacaacggccgctgctgcactacagccaactgctgaccgcccaatggcaggcgctcgcctacggccaccggctgccggccgacgacgctcgccagcgcctctgcgacggctggcgcagccttttcgccgcgggagccaagccatgatgagccggcgcgcgcgcttcctgctgctggccgtgctcctgctgctggccgggctgctggcgatcttcctggccagccgcctgcaaccctatacggagacgatcgacctcggcccatcgccggaggcccggcgcaatccctacctggccgccgaactgttcctgcgcaagcagggggtcacggtgagccgcgccgacggccttgaggtcctcaaggagctgccgccctccgggcataccctgctcctgctcggcagccgctccggcatgactcccggccaggctcgccgcctgctgcaatggagcgagcagggcgggcacctggtgctgatcgccgaacgcctgtgggacgaggacgagaagaagagcggcgacctgctgctcgacagcctggatatccgccagtacctgaccgaggacttcgacgacagccaggaccgggccagcgaggaaaccgccgacgccgacgccgacgccgacgctgacgccgacgaaggtagcgtcgacgaccacgcgaccgaagcgccgccggaggacaccgccggcgaggaagaagagcccgccgacagcgtgccggactattccgcactgacccgcctgtacctggaaaacgagcgctcgccggcctacatcggcttcgatcccgactaccacctctacgatccgcagaaccacgcctacgcctgggccaacagcggcgacgccacccacctgttgcagatgcagcacggcaagggcctggtcacggtgctcaccgacgcctggatctggcagaaccgcaacatcgagcagtacgacaacgcctggctgctctggtacctgacccaggacaaccaggtgaccctgctctaccgcgccgaacgcgacagcctcgccaccctgctcgcccgccacttccccgaggccctggcggcagcgctgctgctgttgctcgccggcctgtggcgcgcagggctgcgccagggtcccttgcagccggtggccagccgttcgcgccggcaactggaggaacacctgcgcgccggcgccgacttcctcctccgccagcgcggccacgtcgccttgctgcacggtctgcaacgcgacatcctgcgcagggcgcggcgtcgccaccccggtttcgaacagctcggcgtcgccgagcaatggcagatcctcgggcgcatgacccgcctgccacccagcgccatcagccaggccatgcgcccatatccggcgcagcgcctttccgctgccgacttcacccgccaggtcgcccacctgcaaagcctcaggaatgccctatgagcgaacagacgcccgaacaaccgagcaccgcgcccaacccggcgctccagcgccagcgcgccagccagctggcccaggccctgcgcaccgaactgcagaaagccctgatcggccagggcgcagtgatcgacgacgtgctcaccgcgttgctcgccggcggccacgtgctggtggaaggcgtgccggggctcggcaagaccctgctggtacgcgccctggcgcgctgcttcgacggcggcttcgcgcgcatccagttcacccccgacctgatgcccagcgacgtcaccggccacgccgtatacgacctcgccagcgagcagttcaagctgcgcaaggggccggtgttcacccacctgctgctggcggacgagatcaaccgcgcgccggccaagacccaggccgccctcctggaagtgatgcaggagcgccaggtcaccctggaaggacgcgccctgccggtgccgcagccgttcatggtgctggcgacgcagaacccgatcgagcaggaaggcacctatccgctgccggaagccgaactcgaccgcttcatgctcaagctgcgcatcgattacccggccgaagccgaggaacagaccctggtgcgccaggtgacccgctccgcgcgcagcgacatgctcgacgtggccaacctgcggccgctgctgaaggacaaggacgttctcgccctgcagcggatcgccagcgacctgccgatcgacgaccaggtcctcgactatgccgtgcgcctggcccgcaccacccgcaactggccgggcctggccctcggcgccggacctcgcgcgtcgatcgccctggtccgttgcggccgggcgcgggcgctgctgcgcggcggcgagttcgtggtgccggacgacatcaagggctgtgccctggcggtcctgcgccatcgggtccggctgtctccggagctggacatcgaggggctgtcggtggaccaggtcctgcaacagttgctcgaccaggtaccggccccccgcgtatgaagccatcgcgcgccctgctggcgctgttcgccgcgctcctgctgctggccatcggcctgggcagcctgtcggcgctcggccagcggttgcctgcgcaactgcatacattctggtgggcggcgctcgccgcgctgctcctgctcggcctgctggacgccctgtgggcgcgccgccaggcggtgccgaagctgagccgccagctcagcggcaacctgccgctggggcgctggagcgaagtgcgtctgcatctgcagcacacctatcggcgtccggttcgcctgaccctgttcgatcacctgccggccggcatggatttcgagtacctgccgcaggaggtcgaactgcgcccgggcgaaagcaccgaggtcggctaccgggtgcggccgctcaaccgcggtcacttcgtgtttccccgctgcgagctggaactgcccagcccgctgcgcctgtggcggcagcgccgctacctggaagcacgcggcgagacccgcgtctacccggacttcgcccgcctctacggcgccgaactgatggcggtcgaccactggctcaaccagatcggcgtacgcggcggccagcgccgcggcctcggcctggagttccaccagttgcgcgaattccgcgacggcgacaccctgcgccagatcgactggaaggccaccgctcgcaaacgcacgccgatcgcccgcgaataccaggacgaacgcgaccagcagatcctcttcctgctcgactgcggccgccgcatgcgcagccaggacggcgacctgtcgcacttcgaccatgccctcaacgccagcctgctgctggcctacgtggccctgcgccagggcgacgcggtgggcgccatgaccttcgccggcgacgaccgccggcatctcccgccgggcaagggcagcgcccagctcggcgcgctgctcaacaccgtctacgacctgcagaccagccagcgtcccgccgatttcccggaagccgtgcaggcggtgctgtcccgccagcggcggcgggccctggtgatcctggtaaccaacctgcgcgacgaggacgacgaagaactgctcggcgcggtgaaacgcctgggccgccagcaccgggtgctggtcgccagcctgcgcgaggaagtgctcgacaccctgcgccacgagccggtcgcccgctacgagcaggcgctcgcctacaccggcaccatcgactacctgaatgcgcgcaacggcctccacgagaagctcgcggcccacggcgtgccagtgctcgatgctcgtcccagcgaactcgggccggagctgatcagccgctacctgggctggaagcgcgccggcgtgctttgacggatcagaccgactgcggctggcgggggaagctgaagtaacggcgcagcgcctccaccagttcgaggaattcggcgggcggcgccagcaggtggaagccggaatcgaaatgaccgggcgtgacgtcctcgcaggtccaccggcagtcggcggaaaaatcgatgcattgcgggcgaccgcccagtcccggaaccttcaggcgcagttcgaaacgcgcgccgaccagcatcggcaattggctgatcagcagcaggccgtcctcggagacgttgccgatgtagcccatcggcttatcggtgatgcgattgaacaccttcaggtagctgggcaactgatggcgctggatatgtcgttgaagacccataatggcatttcgctatgatttgcagtccagtatgacgatgccggcgctcggggaacaagctcagcggcagcgttcggactcccgcgaggccagttcgcgacgaatggcgtccagctcggcatcgctcagataaaccggcccgccgccggcgtcctgccgatagaagcggccgccgcgttcgagctgggacaactgttgccgcaagcgcccgcattcctcggccagcgcagcctggcgctggccggcacgttcggcggcggcggtgcgttcctcgcgacgagcatcgaaatactcctgggtgcgctgctcgcgctggcgggtcgcggcgtcacgttccaccacctgcggcctgacttcgacgcgttgcgcgccggccggtggcgtggcggagaagtgtaccttgccctgggcatcggtccagcgatagatgtccgcctgcgccagcacgggcatcagggcgacacagaaccacagggcacgcatgcgaacctcctccgtgaaatccagggcgaagcttaccggatagaccggtgtcccatgcgaccgacggtcagcctgaacgcccgtccaatccctcccggccgcctacaggcgggtcggcacggcgctggccgaggccggcgtctcgctcagccggcccaactggcgcaacgtctccagccgcgccttggcacggtaggcatattcgctggtggggtaacgggcgatgatgaagtggtaggtctgcgccgcgtcaacgaacaggctctggcgttccaggcactggccgcgcagcagcgagatttccggctgcaggtagggccgcgcgcgaatccgccgttcggcccgcgacaggtcgagcatcacctgtgcgcaatcgcctttgtcgtaggcgcggtaggccccgttcaggtcgctgttcagcgaccagctgttacaaccggtggcactcagcgccaggcaggcaacgatcaagcttcgcataggcatatcctccgttgggaactgtatcggcgcgtattggcgtgactgaagggcctgactagactggggtggctctcgccctggcgccaaggagatgccatgcgcttcgcccgccgtctcgtcctgctcccattgttgtcgctgctggccgcctgttcgccgaccacgccgctgttcgtcgcccaggtgaccactggcgaagtcgccgaatacaagcagatgaagagcaaccgcatgaccgccgccatcgaggaggaaggcgacctgctgacctacagcgccatggcgatccgcgacaacaggagcgccgaggcggagaagctctacctcaccggctacgacaatagccgctacagcgccgaggtgcgcggtatctcgctgtaccagatcggcctgatctacatgagccgctacaacgaccagcgcgacgacgccaaggccaccgactacttccagcgcgtggtccgcgagttccccggcacccacgccgccgagcatgcccaggcgcgcctgctggcgatgcgccagcgagccagggagccggtgcagaagagcgcccgcgaattgctcgccacctggaagccacagcagaacctcgacctctacaagaccagcctcgacccggacatgaccctgctgtcgcgccgcgcggtgctcaaggatcgcgtcgacgaagccgccgagctctacctgctggcggtcaacgatccggcgattcctgccggtataaaggaaaaggccctctaccagctcggcctgatgtacctggcgccggacaacccgcacccgaaccgcgacaaggccatcgaatacctgcgccgccagttgctcgactatcctgaaggcgaattgtcgaacaaggccggccggcacctcgaccaggcgctcaacgtgcaacctcgctgatccccgccggactgacccagatcaagcgcccgtcgcggcgcctggtctgcaatggcattcccgcccaatgccaggagcgttgccatgaacctgcataacctgctggtggtcgtcgacccgagcagcgacgaacagccggcccttacccgtgcccagtggatcgccgaacgcagcggtgccagcgtcgagttgctgctgtgcgacttcaacccggcgctggacggcgggctgttcttcgacagtcactcgctgcagcgtgcccgcgacctttacctggacgaacgggtcacctggctggagcagctttccatgccgctgcagcaggccggcatccgcactcaggtcgaggcccagtggggcaagccgctggaccggatggtcctacaacgggtcggcgaaacccggcccgacctggtcctcaagagcacccgcaagcacaacctgctgcgccgcctgctactgggcaacagcgactggcaattgatccgccactgcccgcagccgctctggctggtccatcacgacgcctggcgcggccagcgcctgtgcgcggcgctcgacccgctgcatgccagcgacaagccggccgccctcgatcaccggctgatcgccgccgcccgccagctcgaagccagcctggggctgcgcgccgactacctgcatacccacgcggcgatgccgcgcagcctgctgttcgacgcggaaatgctcgccggctacgagcgtttcgtgctgcaacatgaggaacgtcaccgccaggccttcgacgacctgctggcagcctacccggagatcgccgcggagcgccgccacctgctggccggctatgccgagcaggcgatccccgacttcgtccgggccaacgacatcgacctgctgctgatgggcgcggtcgcccgggggcacctggacaacgcgctgatcgggcagaccgccgaacgcgtcctggaggaggtggaatgcgacctgctggtgctcaaaccgacaaatgacatctgatgcagatagtatgactccgcagtcgccgccgagcctcgccggtggtagcctgcacgccagcgttatccaaggagtcctttgcatgtccgttcgccgcaccaaaatcgtcgccaccctcggcccagccagcaattccccggaagtgctggagcaactgatcctggccgggatcgacgtcgcccgcctcaacttctcccacggcacccccgatgaacaccgcgcccgcgccaggctggtgcgcgaactggcggccaagcacggccgcttcgtcgccctgctcggcgacctgcaaggaccgaagatccgcatcgccaagttcgccaacaagcgcatcgaattgcaggtcggcgacaagttccgcttctccaccagccacgcccgcgacgccggtacccaggaagtggtcggcatcgactacccggacctggtgaaggactgcggggtcggcgatgaactgctgctggacgacggccgggtggtgatggtggtcgaggaagtcgccgccgacgaactgcgctgccgggtgctgatcggcggcccgctgtccgaccacaagggcatcaaccgccgcggcggcggtctcaccgcgccggcgctgaccgacaaggacaaggccgacatcaagctggccgcggacatggacctggactacgtggccgtttccttcccgcgcgacgccaaggacatggaatacgcccgccgcctgctcaccgaggccggaggcaaggcctggctggtagccaagatcgagcgcgccgaggcggtcgccgacgacgacgcactcgacggcctgattcgtgccagcgacgcggtaatggtggcccgtggcgacctcggcgtggaaatcggcgatgccgagctggtcggcatccagaagaagatcatcctgcacgcccgccgcaacaataaagtggtgatcaccgcgacccagatgatggagtcgatgatccacagcccgatgccgacccgcgcggaagtctccgacgtggccaacgccgtgctcgactacaccgacgcggtgatgctctcggcggaaagcgccgccggcgagtacccggtggaagcggtgaaagccatggcccgcgtctgccagggcgccgagaagcacccgaccagccagaaatccagccatcgcctcggccagactttcgaccgctgcgacgagagcatcgccctggcgtcgatgtacacggccaaccacttcccggggatcaaggcgatcatctgcctgaccgaaagcggcttcaccccgctgatcatgtcgcgcatccgctcgtcggtaccgatttacgcctactccccgcaccgcgagactcaggctcgcgtggcgatgttccgcggcgtggaaaccatccccttcgacccggcggcgctgccggcggagaaggtcagccaggccgcggtcgacgagttgctcaagcgcggcgtggtgaccaagggcgactgggttatcctgaccaagggcgacagctacaccgcccagggcggcaccaacaccatgaaggtgctgcacgtcggcgacctgctggtataagcgcacgtcgcggcggataacgcccgcggcgttatccgccctacggaccggtgccccgctggcccaacagcggtgtgctcaggcgaacctggagaaatccggctggcgccggtgcatgaaggcgctgagcgcctcgatcgcctcgggcgagcgcagtcgggtactgaagatatcgccttcctcggcgatcacccggcgaagctcctcgataaacggcgctttcatcaggcgcttgctctccactaccgccgagggcgccaggtgcaggaagcgccgggccgcatcgcgggcgtgctccagcaccgtggcgccatcctccagcgccgcattggccaggccccaggccgccgcctgctcgccgctgaagtcctggccgagcatcagcaattccgcagccctggcatgaccgagcatgcgcggcaggatcaggctcgagccgaactccggtgtcaggccgaggttgacgaacggcatcatcaatcgcgcattgcgaccgacgaagaccaggtcgcaatgcagcagcagggtggtgccgatacccaccgccggtccgttcaccgcggcgatcaccggcttggggaattccagcagggcgctcatgaagcggccgaccgggctgtcgcgcagggatggcggttgctcgaggaagtcgaggatgtcgttgccgctggtgaagcaggcatcgccgccagtgatcagcactacccgcacagccgtatcggcctgcgcctccagcagcgcctcggccatccgactgtacatcgcgcgggtcagcgcgttcttcttgtcctggcggtccaggcgcagggtcagcagccccgcttcgcgttcgacccgaatcagctcgctcatcgtcactccagggatgcggcgcagggccgcggcaatggctgcaaggcaccgccaccgcgccgcgtcaggcgtggggcaggaacaggtccgccagggtctggctacgcggtacgccggccaggtagagatgccgggcgaagcgttcgacgctggcgggttggccgcagagtaaggccatgctgcgccgcggaacaaggcggagatcggccaaggcagagggcaactgcgccgccgacaccaggttgacgcgcacttgcggatgacgcccggccaactccgccaactcgctcgccaggtagtggtcgcgcgccaggtgcagcaactggatcggcgcctggtgttccgcgcgcaaggcctcgcgaagtatcccccagagcggcgccagcccggtgccggcggccatcagcaacagcggtcgctcctgccagtccggctcgtagcgcaacgccccgccgcgcaactcgcccagacgcaggagcgcgccaggcgccaggcgccgggcgcggtcgcagaacgcgccgggagcgctacagtcgatgtggaactccagccatgggtcctcgtgaggcaggctggccagcgaatagggacgcgccacgccatcgtcgctccacagcagcaggtgctgcccggcgcgatagcgcaagggccgctccggctccaggcgcaggcgcagcacatcgcccagccagtggcaggcgacgaccctggccggcagcccgtcgcgctcaggatcgaaaggctgcaacacgaggtcgccgagcacccggcactgacaggccagccgccagcccgcttcgcgccgtaccggatcgagcgcctccgggagggtgtcttccacctcgccctgcaggcaatgcaccaggcaggcgtggcaactgccggcgcggcagctatggggcacggcgatgccaccggcgagcagcgcatccagcaggttgctgccggcggcgacggcaaggcgtcgctcgccgacccgtatgtcaggcactggtgacctcccaggtggcgtcgcagcggtttcgtccgccgcgcttggcacggtagagcgcctggtcggcccgctgcaaggcctcgtcgagatcgtcgtcggcatacagcagggtcatgcccaccgaaaggctcagggtatccaccgtgaccccgaccggttccgcctgttggaacgccaggcgcaggcgctcgcaacagctttccagctgttccgcgtcggcgtggggcagcagcaggacgaactcctcgccgccgtaacgggccaggacgtcgccatcgcgcagacaggaacgcgccaccgcggcgaaggtctgcaggacccgatcgccggcggcgtggccgtggcggtcgttgatccgcttgaagtgatcgaggtcgatcagcgccaggccgtgctgccggttcggcagcaggtcttccagcgcccggctggccatgcgcatgaaatgccggcggttgaacagaccggtgagttcgtcggtggccaccaggtcttccagttggcgcatcatgccgcgcagcgtgtcctggtgcgcctgcaaggcatagcggcgctggcgcatgcgttgccgcatcgcctgtatgtagctggcgaacaggctcagccagaccattacgatgaacatcacgagcacctgcaatgcagcccggcccggtagctcgagacgctgctgcaaggcctctaccaggtagatgccggaaaaagcgatgaacgccagcgccgcacagcgggcgaagacccgcggcggcagttggaacacgccgaacagcagggccagcacgtagaacaccatgaaggtgccgcgcaggctgtcgacgtggtagaggaaataggtcagccaggcgatcgccaccagcacctgcggctcagtcaggctgggatcggcgtaacgcaggttgcgtccgctggcgaacagccagaggaaggccagttggcaagccaccaccaggctggtgctggccgccgcggtggtcggcgctgcgcggtagaagccgctgagtagcgccagccagagcaggaccaggccgagcaggtaggtgcctgcggccatgccgaaccggcggagcaagagcttttgcagcgcacgctgtttcagaggaggcttgtctgtgcgcatgggctccgtcccgtaatggcacctggccgcaatgtaccctgccccctgcgggttgcctagtcgaacgaactgccagctagcggaccgcggatttatcggccgaccagccggctggccgaccaaggtctgatcgtcggcgcgtgcgcccgtctcgccggaacggctatactgtcgcgccttttttgcgccggtgcctgaccggcgcgctcctcggctgcggccggctccgtgaccctgccccgcatccgaattacccgcctgaagaggaccgtgctccatggccgtgatcaagcaagacgacctgatccagagcgtcgccgatgccctgcagttcatctcctactaccacccggtcgatttcatccaggccatgcatgaggcctacctgcgcgaagaatcgccggctgcccgcgactccatggcgcagatcctgatcaactcgcgcatgtgcgccaccggccaccgcccgatctgccaggacaccgggatcgtcaccgtgttcgtccgggtcggcatggacgtgcgctgggacggcgctaccatgagcgtcgacgatatgatcaacgaaggcgtgcgccgcgcctacaacctgccggagaacgtcctgcgcgcctcgatcctggccgacccggccggcgcgcggaagaacaccaaggacaacacgccggcggtgatccactactccatcgttcccggcgacaaggtcgaggtcgatgtcgcggccaagggcggcggctcggagaacaagtcgaagatggccatgctcaacccgtccgactcgatcgtcgactgggtgctgaagaccgtaccgaccatgggcgccggctggtgcccgccgggcatgctcggcatcggcatcggcggtaccgcggagaaagcagcggtgatggcgaaggaggtcctcatggacccgatcgacatccacgaactgaaggcccgcggcccgcagaaccgcatcgaggaactgcgcctggagctgttcgagaaggtcaaccagctgggcatcggtgcccagggcctgggcggcctgaccaccgtgctcgacgtcaagatcatggactacccgacccacgccgcctcgctgccggtgtgcatgatccccaactgcgccgcgacccgccacgcccacttcgtgctcgacggctccggccccgccgaactggaagcgccgtcgctcgacgcctacccggagatcgtctgggaagccggcccgtccgcgcgccgcgtcgacctggacaaaatcaccccggaagaggtgcaaagctggaaaccgggcgagaccctgctgctcaacggcaagatgctcaccggccgcgacgccgcgcacaagcgcatggtcgacatgctgaacaagggcgaaacgctgccggtggacctgaaaggccgcttcatctattacgtcggcccggtcgatccggtcggcgacgaggtggtcggcccggccggtcccaccaccgccacccggatggacaagttcacccgccagatcctcgaacagaccggcctgctgggcatgatcggcaagtccgagcgcggtcccatcgccatcgaggcgatcaaggacaacaaggcggtatacctgatggccgtcggcggcgccgcctacctggtcgcccaggcgatcaagaagtccaaggtgctggccttcgccgaactgggcatggaagcgatctacgagttcgaggtgaaggacatgccggtcaccgtcgcggtcgataccaacggcgagtcggtgcacatcaccggcccggcggtctggcagaagaagatcgccgaaagcctggcgatcgaggtcaagtaagcctgctccgtccctgaaaaagcccggccccgcgccgggctttttcgtacggccactggccggagcctgggctggcagcgccgcaggcgccttggttcagccgaaccagaaatacagcagggtcaggttcgccgccgagatcaggccgaacaacgaccaggccagcgcgctgacccagcgcgggttgacgaactcccccatgaggccccggtcgctgctgaagcgaatcagcggccacagggcgaacggcaattgcaggctgagcaccacctggctgagcaccagcagcttgcctaccgcgccttcgcccagccagagcacgccgatcaaggccggcaccagggccaggccgcgggtgatcaggcgccgctgccagcagggaatcttcgcccggaggaaaccctccatcaccacctgcccggcaatggtgccggtgaaggtcgagctttgccccgccgccagcagggcgaagccgaacaggaagctggccagggcgccgcccaccaacgggtcgagcaggtggtaggcgtcctggatctccaccacctcggtatggccgctgccgtggaaagccgcggcggcgaggatcaggatcgccgcattgaccagcagcgccagggacagcgagccgatggtgtcgagccgggaaaagcggatcgccgagcgtttgctcgccgcgtcgtcgccgctgacccgagtctgcaccacggacgaatgcaggtagaggttgtgcggcatcaccgtcgcgccgaggatgccgatcgccaggtacagcggctcctggctgctcagggtgtcccaggacggccgcaagccggcggcgacatccggccagtaggggccgatcagcaccagttcgacgaagaaacacgcgccgatggtcgcgatcagccccagcactatggcctccaggcggcggaagttggcgccctgcagggccagcacgatcagggtatcgaaggcggtgaggaccaccccggtggtaatcgagacgcccagcagcaggtggaaggccagcgccgcgccgagcacctcggcaaggtcggtggcgacgatcgacagttccgccagcagccattggccacgcgccacgccagggcggtagcgctcccgggagagctgcgcgaggtcgcggccggtggcgatccccaggcgcgaacagaggctttgcaggagcatcccggaaaagctcgccagcaccactacgaacagcagcgcgtagccgaagcgcgagcccgcctcgatggcggtggcccagttgccggggtccatgtagccgaccgagaccagcaggccggggccgacgaacagcgccagcttgcgcagcggcgaggcgtcggccggcaccgccacgctgtggctgaccgccgagggacagaacggcgcggtggccgtggtgggcagggagtatttcacgaggcgacgccggatcgggggaggaagtgcgaccagcctaaacgtttcaccccggtcgcgtcttccctcgcctcaggcctgggcgcgctggccgaccaggctcagctcggcgactttctcgcgccgctgcgccaggtagcgggtacaactgacacgcaggaaggaggcgaagttgagcacctcgccgcgatagtccatcacttcctcgtagagattggtgatcaactggttggtgctcaggccctcgccttcggcgatttcccggaggatgtcccagaactggttctccaggcgcagggtggtcaccaccccgcggatgcgcaaggaacgcgagcgcgattcatagaggatcggatcggctttcacatagagttcgcacatgcgcgggggtctcctgggtctcagtggctgatgcgggtgccgagcgcctcgaggaagcgcgccagccacgccggatgcgccggccaggccggcgcggtgaccaggtggccgtcgacgtgggcctggtccggcggaaggtcgacgtactcgccgccggccagccgcacctccggggcgcaggccggataggcgctgcacgcccgcccttgcagaacgccggcggcggccagcagctgggcgccatggcagaccgcggcgatcggcttgcgcgcggcatcgaagtcacgcaccagagtcagcacctgctcgttcaggcgcaggtattcgggggcgcggccgccggggatcagcagggcatcgtaatcctcggcgcgggcctgggcaaagtcggcattgagggtgaagttgtggcccggcttctcgctgtaggtctggtcgccttcgaaatcgtggatggcggtgcgcacgctttgcccggcccgcttgtccggacacaccgcatgcacctggtggcccaccatctgcagggcctggaacgggaccatggtttcgtagtcttcggcatagtcgccgaccagcatcaggatcttcttcgcagccatcacgcgcactccttcgggcagggcccggtcataccggggatgcacctaaggtagccaatccgcagggggacgcgggtaatagacggttactacacgcgtgccgggttcagatgccgatcttgtccagggcccgcccgacgccttcccagaacgagcgctgcacgcgtttccggtagccgctggcggcgaactgcatgggctcctggacctggtgggtagcgccgatttccgcagcgccgagatcggccgccaccaattgcagcgggccatcgccctcacccgccgggtgctcgctcttcggtggcgggttgagttcgtcgtagcgcaggtagtagaccgagccggccctggcctcgagcatgaagctggcgatgcgggtgaaatccatcggaccgtcggcgaacagggtccagaagctgcccgccagcggccggcgcatttccagcttgtagctgccggtctcgaactcgaacgccaggtagccgttgctcggcaggctgccgatcagttcgttgttgaggaagatccccggcgcctcgagttcctcgtccgcccactggctccgcggacggtagaggtagacggtggcgtggctggcatcggcgctcgaatgggcgacgaaggccggtccgtccaccgcaccgaagaacgcgccgggcgtgctgcagccgaccaggctcgcgacgatcgacagggccagcgacaggctgcgcagcatgctccatccctcttcttatggttatccgcgcagcataaccagccgggccgggcctgccacccgtcgaaagtccggttctccgggagaacggcctcaggccgggcgcggcaccttggccagcgccggcgccggcatcagccggcgcaccagccacttgcgcaccggcaccacgccgcgctcctggaacagcacgcagaacgccaccagcaggaccaggaacagcgggtagtagagcagcgacgatggcagcgcggccgccgcctcggtgcaggcgcgccagtcgtcgagacaacgccccggcacggcgataaggcgctcgctacgggagaacagggtgaacatcggcacatgcagggcgaacagcgacagcgaggcggcccccaggcgcggcgaccagtggcggacgaaaccgctcttcgggtcggcgggcagcgcgcaaaggcacaccagcagcaactgggccggcagcagcaggccgttgtgcagcaggaagtaccaatgtttggcgccctgggtgaacaggtagtcggccaccaggaaggccgccaccaccagcgccaccagcgcggccagcaggccgcgtcccggcaccatgccacggtcgcggtagccgcggaacaacccgtaggccaggatgccgccaaggaattccggcaggcgcagcaacggattgcggtgcagcaggccggtccaggggatcccgtagctctcgctggccactaccagcgccggcgggatcaggtagaccagccagaccagcgccagcaccttccacttgtgccggctgcgcatcagccgcggggcgacgaagggaaacgccaggtagaagaacatcagcgtcgacagcgaccacaacggcgcgttgaaggtcaggtaatagggattccaggcctgcagcaggaggatctgcaggatgctgttgacgaacagttcggtgttgctcatccagtgcaggaagagttccgggtgggtgcggccgagcacttcgttggtgtcgtagatgacgaagcgcggggtggccttgtccagctcgggaccgattcccaggtggctgagggccagcaacaccaggatcgacagcagcagggagaacaggtgcagcggatagagattggacagtcgcttggtccagaagctgcgggcgctttcgcgcaaccggccgctgcgtgcgtaaacatgggccaggaggaagccggaaagcacgaagaaggtactggtggcgaagaaccccaggctggtcagttcgtcgagaccgggaaacttctgctctttcggataggtatgcagggtgtggtacaccaccacgtacaggccaagcaggaagcgcaaccattccagtccgatgaaacgttccttggagtcgggcgttgccacgcatctctcctttgtcattgtaatgggcggtccggggtagacccgcaagctccccggcaagtttcaccgggccggccagcggctacgaacggccgctccctagcgccggcggtcgaggaaattcaccactacccggtcaagccaaccccacaggcgctggtgcaggcgcatccacaggggtcgcgcgcgccacatcgccagggtcacctcgcggctgtcggcgaagtccgccagcaggctcgccgccgcctcattggtgaagtccgggtcgagggcctcgagattggcgtcgaggttgaagcgtagattccaatgatcgaagttgcaggagccgacgctcacccaatcgtcgaccatgaccatcttcaggtgcaggaagcgcggctggtattcgtggatgcgcacgccggcgcgcagcaggcgcgggtagtagcgctgcccggcatagcgcaccggggcgtggtcggtgagccgcccggccagcagcaggcgcacctccacgccgcgctgggcggccttgcgcagggcccggcgaaccttccaggtcggcaggaagtacggcgtcgccagccagatccgtcggcgcgagccgttcagcgcgcggaccagcgattgcaggatgtcgcggtgctggcgggcgtcggcgtaggccacccggcccaacccacgggccgcccccggctgcggcggaaggcgggtaagggtcatgccctcgcggggcttccaggctttctcttcgagacaggccagccattgccgctcgaacagcgccgcccagtccgccaccaccgggccgtccatctcgaccatcacctcgcgccaggcgctgacgtcgctgaccggttcccagaattcgtcggtgatcccggcgccgccgacataaccgaggcgcccgtccaccagcagcagcttgcgatggtcgcggtagagattgccgccagtcagcttccagcgcagcgggttgtacagccgcagttcgccgccggcctcgcgcaggcgctggatccaggcgctgcccaggccgaggcagccgaagccgtcgaacaggcagcgcacggcgacgccccggcggcgggcatccagcagggcgacgagaaacagttcggcgcaatgcccgtcttccaccaggtacagctccagctcgatgctccgctgcgccgcctcgatggccagcagcatgcgcgggaagaaccgcacgccgtcattgagcagggcgaagcggttgtcgctgcgccagggaaagaccgggccgctcaccgcgaagtgaagatcagcacggcgccgaccggcaccgagagcccgatgctgccggcgccggccagcttgcgcagggtctcgatgccgggggcgaggtcgaagtcggcggcgtccagcaccagcggcgacagggtcaccacctggaagcgatgctcgtccaggcgggtcaccaacaggtcgctggcgtagctcttgcgcttgccgtgcaggctgacggtcaccggctggcgcatttccagttgcacgccgtcggccagctcgacgatcggcgccaggtcgagctgggcggtgatctccgcctcggcgaagcgcttggtctcgaacagatgctcgcggatgcgttcgtcgcgcagcgggatgtcggtgctcaccgagtccagctcgacgcgcaggcgcgcctgccccttgtcgtcgaccttgccgtgcatgaccaggaagcggccgacttccgaaagggtagcgttcttggtggagatgaaactgagtcgcgacgactcgtagtccaggtaccaggcggcctggaccggcaaggccaggagggccaggccgaggcagatcaacttgtgcatgcgggctccctttgcgtccggcgccaccttaaaccggccgcctgggagcaggcaaactcccgcgtcagtcgagcgcgtgctgcaactgactgacggtatcggccagggttcccaggtgccggcggcgcacccgttcgacgcaatcctggtcgcgcggccagtgcagcgccacgctgccgagcaggcgaccctgggcgcgtaccggcaaggccaccgcgcggatcaggaacggcaggcgcaccggatactcccagtgtccctcggtacgctcgccgtagccctggccgtgggcctgctcgcgggtgcgcaaccagaggtcctcgtctacctggtgctggcgcgccaggcggcgcacctcgctgtctgccagttcgcccaggcaggccttgcccatggccgaatggaacaggctggcgtgctggccgaccaccagccggttggccgggtagcgcttgcgcaggacgccgggcaccgagctttccgccaccagcaggcggtcgccgtcgagaatcgacaaatcggcgaccagcccggtgcgctcgctcaactccaccagcagcggcgcggaacgctccaccacctggcaacggaagcgctcggcggcgtcaccgtagaggcgggtggaacgcagccggtagcgccggtcggtcaagccgcggtacagccagccctgctccagcagggtatgcagcagccgcgacaccgtggccttgggcagttcggtcaggtaatgcagttcctcgagccccagcgcctggtgctggcccagcagatcgaggatcgccagcgcccgctccaccgaacgcacggttcccgcctcttctctttccggcatgacgacacctccaccgtcgacagaccgttatggcaaagcaagatgcaggcccaggtcatgtaggaagaatctgcgaatacgccagcattgctccgcggcctagtcgatgccccctggagcctcgagcatcgccggcggacggcggctgacccaacgggtcaggccctcgtgggcatgggccagttgcagcaccgccaggtcggcctgcgccgggccgattatctgcaatcccatcggcaggcccgccgcgccgaagccgatcggtacgctgatcgccggcaaaccggccagggtcgggccgatcaccacctccatccagcggtgataggtgtccatcggccgcccggcgacctgccgcggccacgccgtttctgcatcgaaaggaaacacctgggcgctgggcagcaagaggaaatcgtaacgttcgaacagacgcgccagcgcccgataccagtcgctgcgatccagcgaggcgcgatagacctcggtggcgccgaggccgagcccggactccacttcccactgcgcctccggcttgagccggacgcgccgtgcgggatcggcgtaaagctcgccaagcgagccctgcaccagccactggcgatggaccagccaggtgcgccacaggcgctccaggggatagtccggcaggcacgcctcgacgtcgcagcccagctcggcgaaatcgcccagcgcggcttcgcaaagctccagcacgccctcctccatcggcaggtagccggcgtagtcgccgagccagccgagccgggctccgcggaaatcgcgcccgaggtcgtcggcgaacctgcgcggatcgtcgcgcaacgacagcggacagcgcggatcgtagccggcctgggtggccagcagccgggccaggtccgccacgctgcgccccatcgggccttcggtggccagttgctggacgaacagttccgcttgcgggccgtgcggtacccgtccctgggacgggcggaagccgtagacgttgttgtaggcggcggggttgcgcagcgaccccatcatgtcgctgccgtcggccaccggcagcatgcgcagcgccagcgccaccgccgccccaccgctgctgccgccggcgatccgcgccggatcgtaggcattgcgggtggtgccgaacagcgggttgtaggtctgcgagccgagcccgaactccggtacgttggtcttgccgatgacgatcgcaccgctgctcttcacccgctcgacgacgatggcgtcgtgctccggcacctgcccggcgaacagcggcgaacccagggtggtaggaatgccggaggtggcggcgaggtccttgatcgcctgcggcataccgtgcatccagcccagccattcgccgcgcgccagttgccggtcgcgctcgtcggcctgggcgagcaggcggctttccgcctgcagcgagacgatggcgttgacccgtgggttgaaccgttcgatctgcgccaggtaggcctgcatgacctcgcggcaggacagttcgcgtcggcggatcgccgcggacagcggcagcgcgtcaagcgcgacgatttcctcgtggccgtcgcttcgatggcgggtggcgctcattcacagactccttgccggcttgcccagggccggttcacgggggcgcggggcgggcgtcgcgccctcccgcagatagagggtggcgagcagcccgaggaaggccgcgccgagcacgtagaacgccggcgccactggcgagccgccgacctcggtgagccaggtgacgatgaacggagcgaaaccgccgaacagcatcaccgccaggttatacgccaccgccaggccggtggaacgcacccgcaccggaaactgctcggccaccgcggtcggcgccgggccgaagaagccgccgatcgccgtgcacagcaacagttgcatcagcagcaggcgccccaggctcggcgccgcggcgacccaggcgaacagcggatagaccatgagcatgaaggccagggtcgcgaccagcagcaccgggcgccgcccgacccggtcggagagtcccccagccaacgggatcaccagggtcatcagcgccaccgcagccatctgcaccatgaacacctcgtccagcggcaggcccaactgcttgtgggcgaaggtcggcatattcaccagcaccacgtagaaggacaccgtgccgatcaccgtcaggcccatgctcaccagcacgctgcgccggtattcgcgcagcacgccgagcagcccctggcgctcgccgggctcccggatggcttcgaggaaggcctcggtctcgcccatgtagcggcggatccacaatcccaccggaccgatcagcagaccgaacaggaacggcacccgccagccccagctctccagggactcggcgtccaggcaatgggtgaccagcgcgcccatccccgcaccggcgaacaccgccaggcactggccgaacaattgccaggaaccgtagagaccgcgccggtgcggcggcgcgctttccaccaggaaagccgtggcgctggcgtactcgccgccggtggcgaaaccctgcagcattcgcgcgatcacgatcagcaacggtgcgccgacgccgatcgccgcgtaggtcggggcgaaggcgatcatcgcgatggacagcgtcatcagcaggatgatcagttgcatcgccgccttgcgtcccctgcggtcggcatacaggccgagcaggaccccaccgaccggacgcatgaagaaaccgacaccgaaggtggccagggccatcaacagcgaggtgtactcgtcgccggaagggaagaacagcctggcgatcaggctggaaaggaagccgtagacgatgaagtcgtaccactccagggcgttgccgatcacggcagccgccacctggcgggtacgcgaggtaccgctcgggcaagcgtgcatgggaatctcctggtaaccgggggaatgccggcgcggctcaggccgcgccgttattggcggcagtcagtcgaaggccggacgccgcgggggcggccagccaggtctcggcgagcgcgccccaataggccgcgccccggaccaggatgtcgtcgttgaagtcataggccgggttgtgcaccatcggccgtcctctgccgttgccgatgaacaggtagctgccggggcagcgctgtagcatccaggcgaagtcctcgctgcccatcagcttcggcgtgtcgccgtcgacctgctccgcgccggccagctcgaccccgacctggcgggcgaactcggtttcctcgacgctgttgaccagcaccggataggccgggtagtgctcgatgctggcctggcacccatagctggcggcctgcaactcgatgatctggcgaacccgctgcagcacctgctcgcgcacctggccgtcgagcgcccgcaggctcaggcgcagcacggcgcgctggggtatgacgttggccgcctcgccggcctgcaatgcgccgaccgtgaccaccgcggccttctgcggatcgacgttgcgcgccaccacgctctgcagggccatcaccgcgctcgacgcggcgagcaacggatcgacgctcaggtgcggcatcgaaccgtgtccaccgacgccctccagggtgacgctcagcaggtcctgggaagccatcatcggtcccgcgcggaagcccaggtgcccggcctccagtcccggcatgttgtgcatgccgaacagcgcatcgcagggaaagcgctccagcagcccgtcggcgagcatcgcctcggcgccgccctggccttcctcggcgggctggaagatcagtaccagggtgccgtcgaaacgccgcgtcgccgccaggtagcgtgccgcgccgagcagcatcgcggtgtgtccgtcgtggccgcaggcgtgcatgcgcccgccgtggcagctgctgtagccgagccccgtggcctcgacgatcggcagcgcatccatgtccgcccgcaggccgagccgccgcgtgccgtcgccctggcggaggacgccgaccacgccggtgcggccgatcccttcgtgcacttcgtagccccagccgcgcaggcattcggcgaccagcgcggcggtgcgtcgctcctcgaagcccagttcgggatgggcgtggatgtcctggcgcaggctacgcaggtcgtcggcgacctcctcgagccaggccacgatgtgtcgatgtcgagccatgccgtctctcctctggccggattgcgctccggtcttgttggcgggaggcccggacgcaaggccggccgggcgtggtcacagctaagcgcggcacgcggcgaaggacaacggaaggcggttccactgggtggaacccaaggcccgcgccgccctccgccggtacgtcagaactgttccggcggcacttcgcggaagttcagcacggcgaacaccggtacctcgggagtgatcgagggaatattggccatctccttcaagggcttgagcttctcttccaggtcgaagtcgagcagcttcagcagcaccggctccagggtcgccacctggaccagcccttcgccctggcgggtgaccagcacgtcggccttcaggcggcgctgctggccgtgcaggtcgagggtgaagtcgagcttctcgacccgcgactggccgacccgcaggtcgtcgaagccggccatgtccaggcggctctccacggtggcctcggggaagcgcgaggtttcgaagaagttgtccttcattcgctcgtcgcgcagggccaggccgctgtccagggtgcccagcggcaccacgatgcgcgcgacgccctgcttgtcgatctggccgctgagacgatcgaagcgctgcacctcggccatcttcgcgcgtttcacggaaacgaagctgatccgcgagtaatccggctccagttgccattccgccgccgacagcagcgggctgaggagcaataacaggacacacaatacaacaggcattccacctccggcttcgggccggcgccgtccctcgccccgcgccccgacatgcgccgccggtcagtccggcagcctgtccgcctcgggcatgagccggcatccctcgcgcgggcccagccaggcggccgtctgcgtactgccgaggccgcgggcggtcacccggcggcgggcttcgtcgtcgaagaagccgctgatcggcacgtactgttgggtataggcccggcaatagtccgcggagttccccatcacgtagcggcaggagcagtactccttggccgtgtaggcgccgatgatggcgggaaaggccgccaggtggatgcggttctgccaggcccacgcgagggcagcgagcagccccaggacgaacaggaagagcaagggatggcgacggatcatggccgcgcctccccggcgaacgccgcctgtgccaggcgcaggaattcgttgtggcggaaacgcccgtcgcggtcgtcggcgtagcgcacgatcaccagcttctcctcgggcagcacgtagagcgcctggccccagtggccgagcgcggcgaaggcggtctcggcgacgtccggccagggcgccggcgcgcctttcaccgcacggttcaaccaccactggccgcccggcaccgcctcgccctcctcttccgcgctcggccggtagcgggcgaagggcgtcaggttgaactcgacccatgccagcggcagcagttgccgctcgcgccagcgcccgtggcgctgcatcagcaggccgacgcgcgccaggtcgcgggcgctcatgtagacgtacgacgagccgacgaacgtgccggcggcgtctcgctcccataccgccgaacggatgcccagcggctcgaacagcgcgcgccaggggtactcggcatagtccgcgccgagcatgccgtggagggccgccgccagcacgttgctgtcgccgctggagtagcggaaacgccggcccggcggccgggcctgcggggtttcggcgacgaagccggccatgtcgtcacgcccacgggtgtagagcatcgccaccacggaggatttcaatggcgcgaactcgtagtcctcctgccagtccagcccggaagaccagttcagcaggtggcgcaacgtcacctcgggatgacgggcgaacggcgggtagtagcgcgccaccgggtcgtcgagctggaagcgcccttcgccctcggcgacgccaagcagcgtggcgagcaggctcttgctcaccgaccaggtaaggtgcgtggtctctgcacggctcgggccggcgtagcgctcatagaccagacgaccgtcgcggatcaccactaccgcgtcggtgcggatgcctttgcgacgaacatcgtcgcgacgaccgaaggcatagcgctcgaatgcctccagcgccggccccgcgggctgttgggcacggggccagtcggtgtcgggccagtcttcggccagggcagggagggcgaataccagggccagcgcggcgagggcgcggcgggacaacggcaaagcgggcatcggcgggccctctcgacggtcgaggggcaaccctagcatggcctcgatgacgccaggaagcgcggactcagcctggcatgcggtagtcgtccgggccgagcaggtcgatgccgcactcgaggttctcgatccagtagaggaaggcgctgatcatttccttgccgacgaagggccgcccgtgttgcggcacgatcatctccacatccatgtcccggaccatccgcgcccacaggcggcagatcttgttcgccgccatgtagcggcgatggaatccgtccatgtactggatatgcgcggcgaaatcgctgaccggcgccgcgtcgtccaccagcgaggcgcccatatcgcccgagaaaaggatcttgctcaccgggtcgtagagctggaagttgcccaccgaatgcaggaaatgcgcggggatcgccttcaacgagcagtcgccgagagcgatcgcctggccgcggtcgggcaacggcatgacccggtcgtaggtgttgatgccatggctgaccgccaggtagttggccgtcaggtgcggcaggaagcgcgcccacagcttggagcagatcacccgggcgcgggtgtgcagcagccacttgtcgagggcggcgatgatgtccgggtcctggtgcgaagcgaagatgtagtccagctcctgcagcggaaagcgtttcgacaattccagcgagagcggcgtgtaggtcaggtcgccgccgggatcgagcagcaggtactggccgttgtcgacaatcaggaactggttggactggaccccttcgccgctgacgaggtcatcgaaacacaggcactggtggctgccgttgtcgaacagcacgatcggttcgcgtcgcatggtcggtgaaatctactctgtgcaggcgccgaggagcattcctcgccggatgctgcgcagggtaagcgcctgcggcgcggcgcctcactgacctgggtcaagcccgaggcgggtcaaggccttctccaggcgaactttgcgggccccgttggcaatcgccagcaagccgcgatcgcgttgccacaatgcctcccaggtcgaggcgttggcggcgaaggcggcatccagttgcccctccagcgccgagaactgttcgaacagcccagccagtaccgcctgggtgccgacgcaggcgaccggatgccgcgcgacctcggcgcagccgccgaggatgccggccaggcgcagcagcagcggcgagggccagccgcattcatggccgaccccatagagccagccgaccagcgccgccagcacatggacatcctccagcaggcggaacggcctgacgtagtcgtcccaaccatcgccgggcaggcgctcgcaatgggcaccgtcgagcaacaggcgggaatgcggcacatccggcatcagcggcagcgccggcaacgcctccaggcgcgcccccggggcgccggccaggaccaccgtcatcgacagtcgcggcggctgccccggagcctcgtcgcgggcggccaccagccaccaggaggcgctgtcgccagcggtgacgaaatccttttgtccatgcaggaccagcccctccaggcgggtctgcaggtccgccgggcgcacgctgcgcttctcggtcacgcacagcgcgccgagaccttccggcgccgccggccagagcgcgcgcagggccgcctggtagccggcgaggaaggccaggcccggactcgcggccaatcgtccgccgagcaccgcccgctccagggtgccaagaccgtcggcgcgcgccagggcggcggcgtgccagtcttccagggagccttcggtgggcaggcggtcgagcgggccgagcaagcgttgccaggacatggcggactccagtgtggaatgtgtcggaaccggcatcctgccgagggtgccagcgttgaacaacggcgcgttacatccggcgacaatgtcatacaagcatcacgcccctgtcacaggggtgacaccgcgccttcctagcctgagcttgcacaacaaagccgagcggccgcaacccgcggcgccggcccaaggaggcccaggcatgacccagaccgccattacccgcgaacccgtcgccggacgccgcctgaaggccgagcgcctgaacggcgcccgcgccctgcgcgaggcccaggccctgcgctaccgcgtattcagcgccgagttcgacgccaagctcgaaggcgccgaagacggcctcgaccgcgacgactacgaccgtcactgcgcgcacatcggcgtccgcgacctcgacagcggcgccctggtggccaccacccggctgctcgaccatcgcgccgccgaacgcctcgggcgcttctacagcgaagaggagttccacctctccggcctcgacgccctgcacggcccggtcctggagatcggccgcacctgcgtcgctcccgaataccgcaacggcgccaccatcgcggtactctggggcgaactcgccgaggtcctcaacgagggcggctaccgctacctgatgggctgcgccagcattcccatgcgcgacggcggtatgcaggccaaggcggtgatgcagcggctgcgcgaacgctacctgtgcaccgactacctgcaggccgagccgaagaacccgctgccgccgctggacgtcccggaaaacctcaccgccgagctgccgccgctgctcaaggcctacatgcgcctgggcgcgaagatctgcggcgagccctgctgggacccggatttccaggtcgccgacgtgttcatcctgctcaagcgcgacgaactctgcccgcgctacgcccgccacttcaaggcagcggtctgatggcgcggctgcgcctgctgctgcgcagcgcacgcctgctcgggctggtcgcgctcggactgggcctagccgcttgggtcagcctgcgcgagcggctgcccggcgccgacgtcacgccgctgcgccagcgcctgacccgctggtggctggcgcgcctctgcgcggccctgcccttcgaggtcagggtcagcggcgaagcgccccggcaacccatgctgtgggtagccaaccatgtgtcctggaccgatatcccgctgctcggcgccctggcgccgctgaccttcctgtccaaggccgaggtgcgtgcctggccgctggccggctggctggcggaaaaggccggcaccctgttcatccgccgcggctcgggcgacagccggctgatcaaccagcgcttggccgaacaactgcaccgtgggcgcaacctgctgatcttcccggaaggcaccaccaccaacggcgaaagcctgcgcaccttccacggtcgcctgatggccagcgccctggaagccggcgtggcggtgcagccggtggcgatcagctaccgccgcgacggcgtgcccgatgcgcaggcgccgttcatcggcgacgacgacttgctcagccacctcggccgcctgctgcgcggcgagcgcggcagcgtgcatatccagctgctggaaccgatccccagccagggcctggaccgcgccgaactggcccgccaggcccagcaggcggtgcgcctggcgctgttcggcactgccgccactacgcaaccccggcgcgccgcctagtcgcgcttgggcggcaccgccagcacgtcgcacggcaggtcgccgagggccgcctcggccacgctgccgatcagcgcgcggcggaagccggtcaggccctgggtgccgagcaccgtcaactgcggcgcctggcggcgtacctcggtcatgatcacgttgatcggcaagccttcgccgacgcgcaactggatgtcctcgcggcccagccccaggccggcgacgtagtcgcgcagctcgacgttggccttgagctcctcctggtcgacgtaatgctcgacgcggtcttccttgatccccgaataacgcatcatgcctttggcgaacggctcgaaggcatgcagcgcggtgaggctggcggcgtcgaggaagccgagctggccggccatctgcaccgcgcgcgtcgaggtcggcgagaagtccagcgccagcagcacccggcggtactcctcttccggcgcaccggccgcgcgcagcaccgggatcttcgcattgcgtaccacccgctccagggtggtgccgatgaacaggtcgcgcagcggcgtgtgccggtgcgcgcccatcaccagcaggtcggcgccgatctcctcggccaccgcgttgatcaccaccaccggatcgccgacccgcacgatcgccttggactcgacgccgaggcgctccttcagggcctgtccgttcacttccagcaggttggcgatggccagccgttgcggcgcgatcagcaccggcggctggtcgtcgtcgagcacgttcagcacggtcagttcggcattcctcgccttggccagcgccgcggcgcgcatgaccgccagctcggaacgcgaggacaggtcggtcgccaccaggattcgtttcatcttccacctccattggcagagcgttgaacgtcggccccattgaacgatcgacgcgaccgctgccggttgatgtgcatcaagcggatgcttcggactgaaacaattgataggtgattccgccgaccgggccaatggccgctgcgccaggctcagcgctggctcagggcgaaagcctggagttgcgggtagaaggcgcggaaatccgcgctcaggtcatcgtagcgctgggccagttcttcccaggaaccgtccagcaggtgcggtcgcgacagcctccgcgacatgccgcccagcacttcgcgcaagaccgcgaactcgcggtagctgcccagccagtcctgggccgccatccgcggcgcgatgcgcgccaggcgctccggcagcggcgaggcggtgcgcagagtgccgtagacccgctcgacgaactgcggcagcggttcgtcggcgtagtcgttccagtcgcgcgccaggcagtggtcgaagaacacgtccagcaggacgccggcgaaacgccggcgctccagcgggaagcgccgcttggccgcatgcaccagtggatggctgtcggtgaaggcgtcgatgcgccggtgcaactggatggcccgctcgatctcgcccggccattgtccctgcaggcggcccttgacgaagtcgccgtacaggctgccgagcagttgggccggttgcgggccgccgaggtggagatgcgcgaggtagttcatgcgggctagcttaccccagggacggaaccgtcgtttcgatcatcgtcatcagccctgtcgatagcgactatcgtcgcaatcgatccccatatcgtcccacaccgatatatagttcgtcccaacccgatatggacggccaacggaccaccgccatgccactggacatcgacgaaatcatcaaggctctctcccacccggtgcgacgcgacatgctgcgctggctgaaggaaccggagaagtacttcgtcgagcaggaccacccgttcgagatcggcgtctgcgccggcaagttcgaccagcgtaccggtctctcccagtccaccgtgtcggtacacctcgccaccctgcaacgcgccggtctggtgaccagccgccgggtcggccagtggaatttcttcaagcgcaacgaggagaccatccaggccttcctcgaccaactcggcgacgagctgtaagcagcactcgcttccaccccaccacctcgcagtccaggagctcgaccgatgccggcgtctcttctcgtcctcgctttatccgcctttgccatcggtaccaccgaattcgtcatcatgggcctgctgccgcaggtcgccggcgacctgcgggtatccattcccagcgccggctggctgatcagcggctacgccttcgccgtggccttcggcgccccgttgatggccatggccaccgcccgcctggaacgcaagaaagccctgctcgcgctgatgggcatcttcatcgtcggcaacctgctctgcgcggtggccgccaactacggcctgctgatgctggcgcggatcgtcaccgcgctctgccatggcgccttcttcggcatcggctcggtggtcgccgccagcctggtggcgccgaaccgccgcgcttccgccgtggccctgatgttcaccggcctgaccctggccaacgtgctcggcgtgccgctgggtaccgcgctcggccaggaagccggctggcgcgcgaccttctgggtggtgaccctgatcggcgtggtcgccttcgtcggcctggccagggtgctgccaaacgaccgcgaggaagagaaggtcgacctgcgccaggaaatgtccgcgctgaagaacccgtcgctgtggctggccctgggcaccaccgtgctgttcgccgcctcgatgttcgccctgttcacctacgtcgcgccgctgctcggcgaagtcaccggggtcagcccgcgcggcgtgacctggaccctgctgctgatcggcgtcggcctgaccgtcggcaacgtgatcggcggccgcctcgccgactggcgcctgggcaccaccatggccgcggtgttcgccgccatggcgctggtctcggcgctgttcagctggaccagccaggccctgctgccggcggaaatcaccctgttcttctgggccgccgccgccttcgccgcggtgcccgcactgcaggtcaacgtggtccgcgtcgggcatgccgcgccgaacctggtggcgaccctgaacatcggcgccttcaacgtcggcaacgcgctcggcgcctgggtcggcggcagcgtcatcgaccacggcctgggcctgacccgcgtgccgctggccgccgccgcgctggccgcgctggcgctactggccaccctgatcgccttttccggaaacggccgcgcccaggcgcagccggtcctcgattgatcccctgtccgtctattccctagtggaggatgttccatggctactctgttcgatcccatcgtgctcggcgacctcgagctgcccaaccgcatcgtcatggcgccgctgacccgctgccgcgccgatgaaggccgcgtgcccaacgccctgatggccgagtactacgcccagcgcgccgatgcaggcctgatcctcagcgaggccaccgcggtcacgccgatgggcgtaggctatcccgacacccccggcatctggtccgatgaccaggtccgtggctggagcaacgtgaccaaggcggtgcacgccgccggcgggcgcatcttcctgcaactctggcacgtcgggcggatttccgatccgctctacctgaatggcgagctgccggtggcgccgagcgccatcgccgccgaggggcacgtcagcctggtgcgcccgaagcgtccctacgtcaccccgcgcgcgctggacaccgaggagatcgccgacatcgtcgaggcctaccgccagggcgccgagcgggccaaggccgccggcttcgacggcgtggagatccacggcgccaacggctacctgctcgaccagttcctccaggacagcaccaacaagcgcaccgaccgctacggcggctccatcgagaaccgcgcgcgcctgctgctggaagtcaccgacgcggcgatctccgtatggggcgcccagcgcgtcggcgtacacctggcgccgcgtgccgactcccacgacatgggcgattccaaccgcctggaaaccttcagccatgtcgcccgtgagctgggcaagcgcggcatcgccttcatctgcgcccgcgaagcgcaggccgacgacagcatcggcgtagccctgaagaaagccttcggcggcccctacatcgccaacgaaaagttcaccctcgacagcgccaacgccatcctggccaagggcgacgccgatgcggtggccttcggcgtccccttcatcgccaacccggacctggtcgaacgcctgcgccagggcgccgaactgaacccgccgcgcccggaaaccttctataccggcggtaccgaaggctacctggactatccgaccctggcctgatcgcgccagccaggaagagcccgccacgcttgccgtggcgggctctgtgctttgcccgtctagcgcaggcggaaatacggctccggctccgcgcacggatcgcgctgggcgcagcccttgcaaccgccgccgcaaccgcccgagctttgcgcagccacccgctcgaccttgccgagcgcgatcagccgctccaggatcgcctccaccagcgccggcggcgcgtccacctggcggctgagctgtttcagcccacgcgcctggccgtcttccaaggcggcgcggatctgcatgagtgtcgccatcagtgacatcctccctgcccgctcggggcatcggccattcggcctggcagttgcagtacctgctcacggccgaacagacgcaggcaggtcatcaggatcaggttgaagagcagcaccacggcgatggtcaggacgctacgctcggggtgcgcggcgaaggtggcgacctggtagcagagggtcgccagcgagtaggcgacgttcagcccccagagcaccgagaaagccatccagcccttgctgctttcccgggcgatcgcgcccatggcggtcacgcagggcacgtagagcaggacgaagaccagatagctgtaggccgcgatggggctgccgaacttgctcgccatggtgcccatcgagccggtctccatgtcgccgtcggccatgctcgcctccaccgggttggccagcacgctgaggctgaaggtatcgaccaggccgtcccaggtatcgaccagggcgtcgcgcagttgcccgggcaggtcgtagccttcgtagtcgaaggcctcgccctggatctgctcggcggtgtagagggtgttcagggtgccgaccaccacttccttggccatcgccccggtgaccaggccgacggtggcctgccagttgtccggctgcaccccgagcggcgccagcagcggagtgagacgctggctgacgctggccagcgcggaatggccgatgtcgccctgcaccggcttgccgtcgagggtgatgctgttcaggccgccgatcaccaggctgaccaggatgatcaccttgccggcccgcaccacgaagccgcgcaggcgcgaccaggtctgcagcagcaggctcttaaggtgtggcacatggtacagcggcagttccatgacgaacggcgaggcctcgccgcgcatcaaggtgtgcttgagcaacagcccggtgaggatcgccacgacgatgccgagcaggtacagggagaagatcaccagcgcgccgccctggccgaagaaggccccggcgaatacggcgaagatcgccaggcgcgcgccgcaggacatgaacggcgccatcatgatggtaatcagccgctcgcgctgcgcgtccagggtccgcgcgcccatgatcgacggtacgttgcagccgaaaccgacgatcagcggcacgaacgacttgcccggcaggcccagcgcctgcatcaggcggtccatgacgaaggccgcgcgtgccatgtagccggaatcctcgagcagcgagaggaacaggtacatcaagccgatctgcggcaccagcggcaacaccgtgttgaccccgccaccgacgccctgggcgaggaacaccgtgagccaatcgggcaggccgaagcggatacccagccactggatgccgtcgatgaagatcgccgacgagcccttgtcgaagatcggctgtagcgccccgccgatgttgatggcgaagaagaacatcaggtacatcaccagcaggaagatcggcagacccagccagcgattcaggacgacccggtcgagccattgggtcagccggtgcggctgagcctgctggtggtcgcagaccgccgcacagatctcgccgatcagtcggtagcgcgcatcgacgatcgccagctcgggctcctcgccgcagccctggcgcgcctgttccagggtggcgggcggcaagcccagcgccgggccgttgaagatgtcgccttccagcgcctgtaacgccagccagcgcggctcgatggccgaggccgccggagcgcgcgtttccagcaggtagccgacctgcgcctggatggccggcgggtagtccaccgccagcgccgcctgcgggagctgtagggagtcgatggccgccttcagttcgtcgatgccatcggcgcgggtggataccagcggcaccaccgggcaaccgagacgccgcgccagaccgtcgatatcgatgcggatgcgctggctacgggcgatgtcgagcatgttcagcgcgacgatgcaggggatgcccatctcccgcagctgcaccgtgaggtacaggttgcgctccaggttcgccgcatccaccacgttgaccagcacgtccacttcgccgctggcgatgtagcggcaggcgatctgctcgtccagcgaggcctgggcggaaacgctggtcaacgaataggtgccgggcaggtcgaccaggcgtaccgcgtgacggacggtatggaacgcaccctccttgcgctccacggtgacgccggcccagttgccgacccgctggcgcgagccggtgagctggttgaacagggtggtcttgccggagttgggattgccgatcaggccgagggtcaatgcggtcatggggattccgggcggggtcagtcgagcgggacgagggtcagcagggcgaggtccttgcgccgcagcgccaggctggtctggcgggtctcgacctggatcgggtcgcccagcggggcgatgcgcaccacgcgcagcgccgcgccgggcagaagccccatggagaacaggcgttggcgatagccgttgctgatggcgggggaataaccggtgatgcggtaggaacgggacggttgcagtgcgctcatggcggattccaggcagaggaagggaccaatggcctccctggccggtgaccgagaatctaaacgactctcacttaaggctcgcttaaggacgcagtatcggagtggaggagcagcggattcgctgatccagagcaatggaagcggggattttcgccgggcgcggcgaactgtcgccgccagcgcccggtgcgacgggcggctggcggcgcaaggggtcagcgggtattgagctgctgctgcaggttctgcacctgggcctggagggtgttgatgttgcgcatcacctgggtgcggaaggcgtcgaactcggcggtattgccgccctgggccgggcggttgtcgagctggctgcgcaataccagcaggtcatcctggatacccttgatcgtctggctcgggttgccctgcttcttcagcgccgcgacatcgccgccgagggccttgagttgctcgttggtcttgcccagttcgacctgcagggctttcagcttctcctgttcggcggccagtgtctgcagcttgccgtccagttgcgcgaccagttgcgccgcgctttcctgctgggccttgagatcgctggccagttggtcgaggcgtttgccctggccgccgaactggttgctcacatcggcctgctggcgttcctggctgccgagtttctcctgcagttgcttgacctgcaggcgcagcgcctcgcgttcgctggtgacgctggactcgctggcgaccaccttgccgcgaatgtcgtcgaggcgcccggcggcttcctcgctgatccttacgaagctttcctgggtcgccaccaactgctgttccatcaggctgatttgctggtggctccaccaacccaccccggcgagggcgatcagcatcgccccgagcagggcccagagcgggccggtagaggccggacggcgctccttggtgtcgacgacccggcgctgctccggttcgtagacgtgccgcgggtggtggccgaattcatcacggtcggcagcatcggtggtcaggctgggcacatcgtcgagttcgtcgaaagcatcgttacgcatggtgaaaacctgtgaaggggaacggcatcctgccggaggcctggagaaagggccgaatggcgcattatatcggttcggccccgccccttcagcgtctgctcgaagcaaattgccggaccggggcgctccaccgcgaagccgtgcgccccaagacggagcgaacgttgtccggcacagaccgccgcaggccgccagcggttccccgccccgcacgccggcgctggtccgcggcccgcatggcacgtcgcttgcctgggcattgccgggcagattcgagagccggaggatgcatggagttgaacaaatccttgctggattgcatgcgcgccgtgcgccgacgcctacgcgaggaacaggcgctggatatccacttccagcaacgcgatgcgatcgccgcgatgcaggcggcctgcgcccgctccggcgatgcgacgacgcgggagctgggacagcgcctcggcaggctcagcggggtcgcgctgccgccggcggaaccttccctgttgcccgcgcaggcgccgagccgacaatacgccggcccgttgcgcggctgatcagagtccctgggcgcgccaccaggcgcagaactcgtcgagcgcggtccacaggctgacccgcgggtcgtagtcgaggtattcgcgggcgcggttgatgtccagggtgaagttcttcgccatcaccgccatgcccaggcggaacagcaccggctccgggcgccccggcaggatccggcagacgccttcgttgagcgccgccaggccatagccgacggcatacggcaggtgaccgccgaccggcggcaggtcgagctggcgcatcacgtagttgaccgcatcccagaacggtaccggctgcccgttgctgatgttgtagaccttgcccagcgccggctcgccggccagcaggcaactgaacagcgcgtcgttgagattgtgcacgctggtgaagtcgacccggttcaggccgttgccgaggatccgcaggcgtcccttgcggtgggcctggatcattcgcgggaagatgctggtgtcgccggcgccgaccacgaagcgcggacgcagcgccaacacttccaggcccaggtcgcgggcgctgagcaccagttgctcggcctggtacttggtcgccccgtaatggtcggaaaaacgccggggtacgtactcttcgttcaggtccaggtggtcgcgcccgtcgaaatagatcgacggcgacgacagatgcaccaggcgccgcaccttttgccgcatgcaggcctcgacgacgctctcggcaagcccgacgttggccgccaggaagcgttcgcgcggtccccagactccgaccgcgccggcacaatgcaccaccacctcgacatcctcgcagaggcgcaggaccagcgccgggtcggcgaggtcgccgggaacgaactcggcgccccgcgccaccagatgttccaccgcgtccgcacgacgaccgctgacccgtaccgacaggccctgctccagggcgaagcgagcgaaacgcccgccgatgaagcccgtcgcccccgttaccagaatccgcattgcgtttctcccgttgttcttcttgtgccgcgactctagcaacccggagccgcgccaccactggcacagcatgccagaacaacgaccttgcgggccgccggcacgacttgcgttgggcgacagaagcggcgctgcgcgctacaaggtctaacctgaaagccacctgcacgctgggagacgcaccatggccagtcactggatgatctacggcgccaacggctacaccggccggctggtcgctgaacaggcgcagcgcgagggcctgacgccgctcctcggcggacgcaacccggccgccctgcacgccctcggcagccagctcgggctggagtgccgggtcttcgacctgggggatccgcaggcctgccgcgaagccctggaccaggtgaaggtggtggcccattgcgccggtccgttctctgccaccagcacgccgatgatcgccgcctgccgcgccgccggcacccactacgtggatatcactggagagatcgcggtgttcgagcaggcccacgccggcgacgccgaggcccgcgaggccggcatcgtggtctgcccgggcgtgggcttcgatgtgatccccaccgattgcctggccgcctgcctgaaggaggcgctgccggacgcgcaacggctggcgctgggcttcgacaccggcagcgggctttcgacgggaaccgcgaagaccagcgtcgaaggcctcaagttcggcggcaagatccgcgagaatggccgcctgcgcgacgtgccgctgggctacaagcgccgcgacattgatttcggccgcggcctgcggcacgccgtgacgattccctggggcgacgtggccaccgcctactacagcaccggcatcccggacatcgaggtctacctgccggcgccgccgctgctggccctgggcatgcgcctgatcgacccgctgcgtccgctgctcggtcggcaacgggtccaggactggctcaaggggcaggtcgacaaacgcatcgccggccccgaccaggcggcccgcgagcgcctgcgcacctgggtctggggcgaggcgcgcaacgcccgcggcgaacgccgcacggcgcgcctggagacggccaacgtgtacgacctgaccctgcacggcgtgctcctggcagtgcgccacctgctggactaccagggtcccggcggctacttcacgccatcgcggttgctcggcgcgcgctgcgtcgaatcgttgcccggctccggacgaatcaccgtcatcggctgatcagcctgacacccgcaccaagccgtcgccggcgcgggcgagcaggtgctcggtgagcgacgcgagcagttcgccgccgttgcgccaatagtgccagtacaacggtacgtcgatgacctggccgggcagcagctcgaccagttcgccgcgcgccagctcgccttgcacctggcgctccggcaccaggccccagccgagaccgccggcggtgaggcggacgaaaccttccgaggacgggcagaggtggtggatgaaaccgccctcgacgccgaggtccttgagaaagcggtgttgcagcaggtcgtccgggccgaacacgatcgccggcacgccggccagggcggccgcctcgaccccgcggggaaagtgccgggcaatgaaatccgggctggccaggccgcgataacgcatggctccgagcagcagcgaacgcgcgccggccaccggccgcgcgctaccgcagacgcagcccgccacttcgcccgcgcgcatgcgcttgagcccgacctcctggtcctccaccacaaggtccagcagcacccgccgctcggcgcagaaatcgcccaccgcggcggcccaccaggtcgccaggctatcggcgttgagagcgatgcgcaggcgctccggggcaccgccttcatccaggttcggcacccagcgctgcaggtcgccctccagcagccgcacctgctgcacatggttgagcaggcggcgcccgagatcggtgggatgcggcggcatctcgcgcaccaggaccggctggccgacccgcgcctcgagcagcttgatccgctgcgataccgccgattgcgacagccccagcgcctgtgcggcgcgctcgaaaccgccctgctccaccaccgcggccagcgcggcgagcaacttgtagtcgaacaaaatcagttttcctaatgagagatcaacaggattcgttttccttataaaccgcccgcggccacactcgccagcacttttccgatccacccgacgcggaccgaccatggctggcgaaacctcgctgcgcaccctgctgcgcacgctcactcccgaactcaatcccggcgactatgtgttctgtacctgcgccgatggcgcgctgccgaacggcgccgagccgctcgccagcttccgcgagcgcgagggcctgaccctggtgctcgaacgccggcaggccgaacgcctgggcctgccctacgaatacgtggcggcctggatcaccctgacggtgcactcctcgctggcggcggtgggcctgaccgccgccttcgccacggcgctggccgaagccgggatcagttgcaacgtgatggccggctatttccacgaccacctgttcgtcgcccgcgacgagggccggcgcgccctcgccgtgctccagcggctggcggcggaggcacactgacatgtggcagagctatctcaacggcatcctggtggctgccggcctgatcatcgccatcggcgcgcagaatgccttcgtcctcgcgcagagcctgcgccgcgagcatcacctctcggtggccgcgctctgcgtgttctgcgacgcggtgctggtcagcctcggcgtgttcggcctggccaagctgctgctggaaaacccgacgctgctggccatcgcccgctggggcgggatcgccttcctgacctggtacgggctcaaggcgctgcttcgcgcgttgcgcccggacgccctcggcaacgccgcggaaaccgggccacgctcgcgcaaggcggtgcttctggcggcactggcggtcaccctgctcaacccccacgtctatctcgataccgtacttctgatcggttcgctcggcgcccagcaggccgcgccgggcgcctatgccctcggcgcggccagcgcctcgctgatgtggttcttcgccctcgccctcggcgcggcatggctggccccctggctggcgcgcccggccacctggcgcctgctcgacctgatggtggcggccatgatgctgggcatggccgcgcaactgctgttccggggataacgcagtttccgtcttcccgagcgaaccctcgcgccgccaggcagtccagagagaatgcggcggtgttcgccggcgagcttgcagaagcccgtcgcagcgcgccgccgccggcctttgcccctacagttgctgcgtggatatgccccgacacgggtgctatgatccggagttcgcggcactgggagcctaggctccgagtcgcacccggcgccctttccggagcgctccgccgaacgtccccccggggatccaggacgggctcccggacaggcatcggaccggccccgtgaaccggtcgcgcgctagccgcgccagtcctgacctgaggaagaataggagagacaccatggctttcgaattgccgccgctgccttacgaaaagaacgcccttgagccgcacatttccgcagaaaccctggaataccaccacgacaagcaccacaacacctacgtggtgaacctgaacaacctgatcccgggcaccgagttcgaaggcaagagcctcgaagagatcgtcaagagctcctccggcggcatcttcaacaacgccgcccaggtgtggaaccacaccttctactggaactgcctgagcccgaacggcggtggccagcccaccggcgccctggccgacgccatcaacgccgccttcggctccttcgacaagttcaaggaagagttcaccaagacttccgtcggcaccttcggttccggctggggctggctggtgaagaaggccgacggctccctggccctggccagcaccatcggtgccggcaacccgctgaccagcggcgacaccccgctgctgacctgcgacgtctgggaacacgcctactacatcgactaccgcaacctgcgcccgaagtacgtcgaggcgttctggaacctggtcaactgggacttcgtagcgaagaatttcgctgcctgagtctgatcagaaccacgaaaaagcccggcattcgccgggctttttcgttttaatctgcggtccaggagccatcgtctaccctcaggaactggtagaccttcgctcgtgatagcctcttgaggtaaacaagctcttcctaccggcttgtctttcgccctggcgacgaacaaggaaggccccttgaaactggactcccgacacagcctctcgctcaagctgctgcgtgtcgtgctactggcggcgctagccgttggcgtagtgctcagttgcgcgcagatcgtcttcgacgcctacaaggccaagcaggcggtgagcagcgacgcccaacgcatcctcgcgatggtccgcgacccttccacccaggcggttacagcctcgaccgggaaatggcgatgcaggtcctcgaaggcctgttccagcacgaggcggtgcgccaggcgagcatcggccatcccggcgagccgatgctggcggagaaatccaggccgctgctggacctgccgacgcgctggctgaccgacccgatcctcggccaggaacgcaccttcagcattcgactgatcggccgcccgccctatagcgaatactacggcgacctgaagatcaccctggacaccgcgccctacggcgagaacttcgtcaccacttcggaaatcatcttcatctccggcattctccgcgccctggccatgggcctggtgctgttcctggtctaccactggatgctgaccaagccgctgtcgaagatcatcgaacacctggtcagcatcaatcccgaccgccccagccagcaccagttgccgctgctcaaggggcacgaacgcaacgagctggggctctgggtgaccaccgccaaccagttgctcgcctcgatcgaaagcaacagccacctgcgtcgcgaggccgaggacaacctgctgcgcatttcccagtacgacttcctcaccggcctgccgaaccgccagttgctgcagcagcaactcgaccagatcctcgacggcgccggccgccagcagcgccgggtggcagtgctgtgcctgggcctcgacgatttcaaggggatcaacgagcagtacacctaccagctcggcgaccagctgctgatcgccctcgccgaccgcctgcgcgggcacagcgcgcggctcggttcgctggcgcgcctgggcggcgaccagttcgccctggtccaggccgacatcgagcaaccctacgaggcggccgaactggcgcagagcatcctcgacggcctggaagcgccgttcgagatcgaccagcacgaggtgcgcctgcgcgccaccatcggtatcaccctgttccccgaggacggcgagaccacggagaaactgctgcagaaggccgagcagaccatgaccctggccaagacccgctcgcgcaaccgctaccagttctacatcgccagcgtggacagcgagatgcgtcgccgccgggaactggaaaaggacctgcgcgacgccctgcagcgccacgagctgcacctcgtctaccagccgcaggtggactaccgcgaccaccgcgtggtcggcgtcgaggcgctgctgcgctggcaacatccgttgcacggcttcgtcccgccagacctgttcatcccgctggcggaacagaacggcagcatcttcagcatcggcgagtgggtgctcgaccaggcctgccggcagttgcgcgaatggcacgaccagggcttcgacgacctgcgcatggcggtcaatctttccaccgtgcagctccaccacaacgccctgccacgggtggtcagcaacctgctgcaggtctaccgcctgccggcgcgcagcctggagctggaagtcaccgagaccggcctgatggaggacatctccactgccgcccagcacctcctcagcctgcgccgcgccggcgcgctgatcgccatcgacgatttcggcaccggctattcctcgctgagctacctgaagagcctgccgctggacaagatcaagatcgacaagagtttcgtccaggacctgctgcaggacgaggacgacgcgaccatcgttcgcgccatcatccagctcggcaagagcctgggcatgcaggtgatcgccgagggcgtggaaaccgccgagcaggaggcgtacatcatcgccgaaggttgcaacgaaggtcagggctacctgtacagcaagccgctgccggccagggaactgacccagtacctcaagcaggcgcgacgcctgagccaggccaccagcagcgaacggccctgatcagaacaggcggctgaacagccagcccgccaatagcgcgctgcccaggcagagcaacgcggcccccgccgcctggcggcgcagttgcacggcgagatcgtcctcgccctggctggagagaatgaagggatgcgcctcccccggcttgccgagccggtggcgggtcggcgcggcgctgcttgcccgatgccgatcctcggcctccagccgtgccgccaggcgcacccggttccattcgcgctcgtccagctcgccgttgccgtcgctgtcgaagcgcgccagcagcccgtggaaatcgcccttccattcacggatcaccgcaccctgcgcccgttcggcatcgagtccctggcgaccgccaccgctgctgcggaattcgcccagcgcatagagcggctcgccggcatgcaggcgctcctcggtgtagcggtagagccgctctccgccgaccagggtgccgaagctctccagcagtcgcagggtatcgatcggtgcttcgcgaaaagcctcccagcgctgctgggtcaagggtcgcacctcggcgccgcgtgggtcgaccaggcaggcatcggtggcatcgcgcaagccgaatggcgactcgctggcacctttgtcgacggtgcgccaggccttctcgcggccgctgcgcttttcctcgacttcgatgcggtagcgccaccacaggcacggcttgccggtcaagggagcctgcagcgggccttccgggccctcctcgagcaccccgtagagttcgacgaaaccctgcgccgccgaacggatccgcgaggtcggtacgtcgccgagcagacgcgcccgggcaaggcggtgcacgaactgccagccggcccaggcgcagagccccaggctggcggcgatgaacagccagcgcaggtcgaagtccatctcagccgaacagggccttgagatcgacgtcggccttctccgcctcgctgaactgcaacagctcggcggccttgaagccagcgacacgagcgatcagcaggtcgggaaattgctcgatgcgcacgttgttcaggttcaccgcctcgttatacagctcgcggcgatcggcgatcccgttctccaggccgctgatgcgctgggaaaggaactggaaactttcgttggccttgagctgcgggtagttctcggccagcgcgaagagctgccccaggccggcgcgcaggccgctctcggccttgcccagggcattcacgtcggcgcgctcgcgggcgctggcgacggcgttgcgggcggcgatgacccgctccagggtggcgcgctcgtgctgcatgtattgcttgcaggcctcgaccagcttcggcagctcgtcatggcgctgcttgaggagcacgtcgatgttggcccaggccttgcccacggcgtgcttcagccgtaccaggccgttgtagagcaccaccgcgtagccggcgagcagcagcaggacaacccagaaagcgatagcggtcagactcatggacggagctccggaagaagatgctggcattctagctgcgcccgacatgtccaggcacgacggcgatcacgctgcgcccttttcaaaaatgcaaatctttcgcattatgtggcagttttttaacgccctcgcgggtgtttccgacaagcgcgcgccgcttcggcacgccaccaataaagcaaaggaatccgccatgactcgtatgcccctggccaccgccagtctgctggccctcgccatctccctcgccggctgcggcgacgacaagaaagccgaagcgcccgcaacaccggcggccagcacgcagcccgccgcgcccgccgccgccccggccgccaaggtcgacgaggccgccgccaaggcggtgatcaagaactacgcggacctcgccgaagccaccttcgccgatgccctgagcaccgccaaggacctgcagaaagccatcgacgcgttcctcgccaagcctgacgcggagaccctgaaagccgccaaggaagcctggttcgccgctcgtaccccctactcccagagcgaagccttccgcttcggcaacgcgatcatcgacgactgggaaggacaggttaacgcctggccgctggacgaaggcctgatcgactatgtcgccaaggactaccagcacgccctggggaaccccggcgccaccgccaacatcgtcgccaacaccgagatccaggtcggcgaagacaagatcgacgtcaaggaaatcaccggcgagaaactggccagcctgaacgagctgggcggttccgaagccaacgtcgccaccggctaccacgccatcgagttcctcctctggggccaggacctgaacggcaccggtccgggcgccggcaaccgtcccgccaccgactatgcccagggcaaggactgcaccggcggccattgcgaccgtcgcgccgcctacctgaaggccgtcaccgacctgttggtcagcgacctcgaatacatggccggacagtggaaagccggcgtcgccgacaactaccgcgccaagctggaggccgaaccggtggataccggcctgcgcaagatgttcttcggcatgggcagcctgtccctcggcgaactggccggcgagcgcatgaaggtcgcgctggaggccaactccaccgaagacgagcacgactgcttcagcgacgacacccaccacaccctgttcttcaacggcaagagcatccgcaacatctatctcggcgagtacaagcgcatcgacggcagcgtggtcaagggcccgagcctggccgacctggtcgccaaggccgacgccgccgccaacgacaccctgaaggccgacctggccgacaccgaggccaagctgcaggccatcgtcgacagcgccgagaaggatggcgtgcacttcgaccagatgatcgctccggacaacaaggacggccagcagaagatccgcgacgccatcgccgccctggtcaagcagaccggcgccatcgagcaggccgctggcaagctgggtatccaggacctgaagccggacaacgccgaccacgagttctgattccttcctgtgccaacagcgtgcggcccatggccgcacgctgcgtttcagggcctcgaaagcggtcttcgcgggcctttacaaacgcaaatccctcttattttgattagccccaactggtaagcttgcgggctgtttccacgcagtccgggatgttcgccgatgtcgttgccgtcaccttccatgccgctcgcctgtctcctgacggcgctccttctgggcggatgcggcgccgacgacgaaccgctgcgcgccgagcccggcgaacacctgtccgggggcgcgaccacggtgctgcaaagcgaccgcaacgccttctccctgccctccgccaacctcgccccgagccggcgcctggacttcagcgtgggcaacagtttcttccgcaacccctgggtcatcgccccttcctccaccaccgcgcgcgacggtctgggaccgctgttcaataccaacgcctgccagaactgccatgtgaaggacggccgcggccacccgccgggagcggacgcggtcagcgcggtgtcgatgctggtacgcctgtcgatcccggccggccctgcggacggcaagaccctgttgcaccagggggtgattcccgagccgacctacggcggccagttgcaggacgtcggcattcccggcgtcgccccggaaggcaaggtgcggatggactacgagccgatgaaggtgaggttcgaggacggcaccgaggtcgaactgcgcaagccgatcctgcggatcagccagctcggctatgggccgatgcatccgcagacgatgttttccgcccgcgtcgccccgccgatgatcggcctcggcctgctcgaggcgattcccgaagaggcgatcctggccaatgccgatccggacgaccgcaacggcgacggtatccgcgggcgcgccaaccaggtctgggatgccgcacggcagcgcaccgcgctcggccgcttcggctggaaggccggccagccggatatcccgcagcagaacgcgcacgccttcgccaacgacatgggcctgaccagcagcctgctgccccacgacgactgcagcgccgcccaggtcgagtgccgccgggcgcccgacggcggcgagccggaagtcagcgacaacatcttcgcccaggtgctgttctacagccgcaacctggcggtcccggcgcggcgcaaggtggacgacccgcaggtgctggccggcaagcgcctgttcgcccaggccaactgcgtggcctgccacgttcccgccttcactaccggttccgacgccagcgagccggagctggccaaccaacggattcttccctattccgacctgttgctgcatgacatgggcgacggcttggcggacaatcgcccggaatttctcgccagcgggcgggactggcgaaccccgccgctatggggcatcggcctgaccgaaacggtcaacggtcacacccagttcctccacgacgggcgcgcccgcaatctgctggaggcgatcctctggcacggcggcgaagccgaagcggccaagcggcacgtgctcggcttcgacgccgaccagcgcagcgccctgctggccttcctgaattcactctgaggagcccacatgttccgcccacgactgctcttgaccagcctcgccatcgccctcggcgcctgctcgccgcaagacccgcaggccgtcaccagtgccgccctggcgcaacaggtgatcctgccgacctacagccgctgggtggaggccgaccaggccttggccagcagcgccctggcctactgccagggcaaggaagacctggccaaggcccgcgacgcgttccacgccgcgcagaaggcctgggccgagctgcaaccgctgctgatcggcccgctggccgagggcaaccgcgcctggcaggtgcagttctggccggacaagaaggacctggtcgggcgccaggtcgaacagttgctgaagaacaacccgcaggtcgacgccgcggccctggccaaggccagcgtggtggtgcaggggctctccgcctacgaatacatcctcttcgacagcaagatcgacctcgccgacgccgccaccaaggcccgctattgcccgttgctggaagccatcggcacccaccagcagcaactggcccaggacatcctggcgcgctggaagaacgacggcggcatgctcacccagatgagcaagttccccaacgaccgctacgccgacgcccacgaggcgatcgccgagctgctgcgggtccaggtcaccgccctggacatgctgaagaagaaactcggtactccgctgggccggcagagcaagggcattccccagccctaccaggccgaggcctggcgcagcaacgcctcgctggccagcctggacgccagcctgagcggcgcccaggcgctctgggaaggtatcgacggcaagggcctgaagaccctgctgccggccgaacagaaggacctggccggcaagatcgacgccgcctacgccgacagccacgcgaagctggcggcgctggaacagaaaccgctctccgaactgctcgccagcgaagacgggcgcaaccagctcaacgccctctatgacagcctgaacgtggtccaccgcctgcacgaaggcgatctggcccgcgccctcggcgtgcaactgggcttcaacgccaacgatggcgactgaggtcggcaccatgctgcgacgtcatgtgatcggcctgggcagcctgctgctcggcgccttgtccttcggcggctggagcttcagccgcctgggtagccaaccgctggtgctatcggcgcgcgacgacgccgatggccagcattacgcggtgggctaccgcctggacggcaagtgccagttcgccacccgcgtggcccagcgctgccacgacatcgtccagcacccgagcctgccgctggcgctgttcgtcgcccgccggccaggcaccgaaagctacctgatcgacctgaacgacggtcgcctgctgcagaccctggtctcgcagaaagaccgccacttctacggccacggcgtgttccaccagagcggcgagtggctctacgccaccgagaacgacactaccgatcccggtcgcggcgtgctcggcgtctaccgtttcgacggcgagcgactgcagcacagcggcgagatctccacccacggcctcgggccgcaccaggtttcctggatgcccgacggcgagaccctggtagtggccaacggcggcattcgcaccgaggcggaaagccgggtcgagatgaacctcgacgccatggagcccagcctggtgctgatgcgccgcgacggcaacctgctgtccaaggaaaccctggcgcagcagatgaacagcgtccgccacctggcgatcggtcgcgacggcaccatcgtcgccggccagcagttcatgggcgatgcccacgaacatgccgacctgctggcgatcaagcgccccggccgtcccttcgaagccttcccggtggccgaggagcagcgcctggcgatggcccagtacaccgccagcgtggcgatccacgacgacctgcgcctggtggccctgaccgccccgcgcggcaaccgtttcttcatctgggacctggacagcggtgccgtacgcctcgacgcgccgttgccggactgcgccggcgtgggcgcggtgaagaacggcttcgtcgtcacgtccggacagggccgttgccgcttctacgactgccagggcgagcgcatcgccgcgcaaccgctggagctgccttccggcctctgggacaaccacctgcacctggcctgagagcgcggcgtcaacctctcgccataccggtccgcgaaagtcggaagcgacctgcaacacgcttgaaatctttcgccaatcctgtgctttgacaagccttgaaagctgcacgtaatgtgtcggattcgccccgaaacggggcgctctcggcataccagggaccaggattatgttgctccgccgcatgttgatcatgctcgccgcggtgatcgccgtggtggcgattctcgccggctacaaggtctactccatccgtcagcagatcgcccttttcagcgcaccgaaaccgccgatcagcgtgaccgccagcctggccgaaaagcgtccctggcagagccgcctgccagccatcggcagcctcaaggcattccagggcgtgaccctcaccgccgaagtctccggcacagtacgcgacgtactgttcctttccggcgaccaggtgaagctggaccaaccgctgatccagctggaaagcgacgtcgaggaagccaccctgcgcactgccgaggccgatctcggcctggccagggccgagtaccagcgcggccgcgaactgatcggcagcaaggccatctcgaaaagcgaattcgaccgcctcgccgcgcagtgggccaagaccagcgccaccgtcgccgaactgaaggcggcactggcgaagaagcgcgtgctcgcgcccttcgccgggaccatcggcatccgccaggtggacgtcggcgactacgtctcgcccgggacgccgatcgccaccttgcaggacctttccaccctgctcctggatttccacctgcccgagcaggacttccccctgctcagccgcggccagttggtgaaggtccgggtcgccgcctaccccggccaggtgttcgacgccgagatcgccgccatcaaccccaaggtcgacaacgagacccgcaacctgcaggtccgcgccgccctggagaacccggacggcaagctgctgccgggcatgttcgccaacctcgaggtgatgttgcctggcgaggaacaacgcgtcgtggtgccggagacggcgatcaccttcaccctctacggcgactcgatctacgtcgtcgggcagaagaaggacgagcagggccaggtgtcgaaggatgacaagggccagccgcaacgggtcgtcgagcgccgcttcgtcaggatcggcgaacgccgcgaaggcctggcggtggtgctcgaaggcctggagggcggcgagcaggtagtgacttccgggcaactgaagctcgacaacggcgccgcggtggccatcgtcgccgagcgggacctccagcaagagcactgagtcgcgcgccttcccgctccaaggcggaaggcttgccaagggactgaaacatggcttttaccgatccgttcatccgtcgtccggtcctggcgagcgtggtcagcctgctgatcgtcctgctcggcatgcaggccttcagcaagctggtgatccgcgagtatccgcaaatggagaacgcgctgatcacggtgaccacgctctacgccggagccaacgcggagaccatccagggctacatcacccaaccgctgcagcagagcctggccagcgccgaaggcatcgactacatgacctcggtgagccggcagaactattcgaccatctccatctacgcgcggatcggcgccaataccgatcgcctggtcaccgagctgctggccaagtccaacgaagtgaagagccaactgccgccggacgccgaggacccggtgctgcagaaggaggccgcggatgcctcggcgctgatgtacatcagcttctacagcgagcagatgaacaacccgcagatcaccgactacctgtcgcgggtgatccagcccaagctggcgaccctgcccggtatcgccgaggcggagatcctcggcaaccaggtgttcgccatgcgcctgtggctggacccggtgaagatggccgcgttcggcgtcaccgccggcgagatcaaccaggcggtgcagcagtacaacttcctcgccgccgccggcgaggtgaagggccagttggtggtcaccagcgtcaatgcttccaccgacctcaagtcgccccaggccttcgccgccatcccggtgaagaccgacggcgaccgccgggtgctgatgggtgatgtcgcacgggtcgaactgggcgccgccagctacgacgcgatcagttcgttcaatgggattccctcggtctacatcggcatcaagggcacgcccagcgccaacccgctggacgtgatcaaggaagtgcgggcgaagatgcccgaactggaagagcaattgccgcccaacctcaaggtgtccatcgcctacgacgccacgcgcttcatccaggcctccatcgatgaagtggtgaagaccctcggcgaggcggtgctgatcgtcatcgtggtggtgttcctgttcctcggcgcgttccgttcggtactgatcccggtggtgaccattccgctgtcgatgatcggcgtattgttcttcatgcaggccatgggctactcgatcaacctgctgaccctgctggcgatggtcctggccatcggcctggtggtggacgacgcgatcgtggtggtggaaaacatccaccgccacatcgaggagggcaagccgcccttcgaggctgccctggagggcgcgcgggagatcgccgtaccggtggtcagcatgaccatcaccctcgccgcggtctacgcgccgatcggcttcctcaccggcctcaccggcgccctgttcaaggagttcgccttcaccctggccggcgcggtgatcatttccgggatcgtcgccctgaccctgtcgccgatgatgtgctcgcgcctgttgcgccacgaggagaatccctcgggcctggcgcatcgcctcgacctgatcttcgagggcctgaagcaacgctaccagcgcgccctccacggcaccctggacacccgtccggtggtcctggtgttcgccgtgctggtactggcgctgatcccggtactgctgatgttcaccaagaaggagctggcgccggaagaggaccagggcatcgtgttcctcatgaccaactcgccgcaaaccgccaacctcgactacctgaatcgctacaccgccgagttcgaaggcatcttccgcagcttcccggagtattactcggcgttccagatcaacggctacaacggcgtccaggccggcatcggcggcatgctgctcaagccctgggacgaacgcgaaaagagccagatggaattgctccatgcggtgcaggcgaagctcaacgagattcccggcgtgcaaatcttcgccttcaacctgccgtcgctaccgggcaccggcgagggtctgccattccagttcgtgctcaacaccgccaacgactacgagtcgctgctgcaagtggcgcaacgggtgaagcagcgcgccagcgagtccggcaagttcgccttcctcgatctcgacctggcgttcgacaaacccgagctggtggtcgacatcgaccgcgagaaggccgcgcagatgggcgtctccatgcaggacctgggggtggcgctggccagcctgctcggcgagggcgagatcaaccgcttcaccatcgacgggcgcagctacaaggtcatcgcccaggtcgaacgcccctatcgcgacaatcccggctggctcggcagctactacgtgaagagccgcaacggccaactggtcgccctctcgaccctgatcgagacccacgaacgggcacggccacggcaactgaaccagttccagcagctcaactcggcgatcatctccggcttccccatcgtcagcatgggcgaggccatcgagacggttcagcagatcgcccgcgaggaagccccgcgtggcttcgccgtcgactacgccggcgcttcccggcaatacgtgcaggaaggcagcgcattgctggtcaccttcggactggccctggcgatcatcttcctggtcctcgccgcacagttcgaaagcttccgcgatccgctggtgatcatggtcaccgtgccgctgtcgatctgcggtgcgctgataccgctgttcctcggcgtgtcgagcctgaacatctatacccaggtcggcctggtgacactgatcggcctgatcagcaaacacggcatcctgatcgtcgagttcgccaaccagttgcgccacgaacaggggctggggcgtcgcgaggccatcgagcaggccgccgcgatccgcctgcggccagtactgatgaccaccgcggctatggtgctcggggtgatcccgctgatcctcgccaccggcgccggggcggtcagtcgcttcgacatcggcatcgtgatcgcgaccggcatgtcggtgggcaccctcttcaccctgttcgtcctgccgtgcatctacaccctggtggccaggccggatgccccgccaggcgtgacgcaagcggcaaacgcacactgatcggaaacggcggacagcgacaacagcgctgtccgccggcgctgtcgccccatcccacagccctccgggcgcgatcctatgtccgccggcagccgcctccagtagactgcccgctgaaacgcagtggtgagacgagcatggccgagagcgctttttccgaacgtatcgtgcagaacctgctggataccgacttctacaagctgaccatgatgcaggcggtgctgcacaactatcccaacgccgaggtggagtgggagttccgctgccgcaaccaggaagacctgcgcctgtacctgccggccatccgcgaacaactggaatacctggcgggcctggcgatcagcgacgagcaactggccttcctcgaacggattcccttcctggcgccggacttcatccgcttcctcgggttgttccgcttcaacccgcgctacgtgcagaccggcatcgagaacgacgaattcttcctgcgcctgaaaggtccctggctgcacgtgatcctcttcgaagtgccgctgctggcgatgatcagcgaggtgcgcaaccgcgcccgctacccggccgccaccgtcgagcaggcgcgcgaacgcctgcaggaaaagttcgattggctgcgccgggaggccagcgccgaggaactggccggcttcaagatggccgacttcggtacccgccgccgcttctcctatcgggtccacgaggcggtggtgagcggtctgaaggaggactttccgggctgcttcgtcggcaccagcaacgtccacctggcacgcaagctcgacctcaagcccctcggcaccatggcccacgaatggctgatggcccaccagcagctcggtccgcgcctgatcgacagccagagtgccgcgttggactgctgggtccgcgaataccgtgggctgctcggcatcgcgctgaccgactgcatcaccaccgatgccttcctgcgcgacttcgacctctatttcgccaagctcttcgacggcctccgccacgactcgggcgacccattgctgtgggcggaaaagaccatcgcccactacctcaagctgggcatcgacccgctgaccaagaccctggtgttctccgacggcctcgacctgccgcgggccctgaagatctatcgcgcgctgcagggccggatcaacgtcagcttcggcataggcacgcatttcacctgcgacctgccgggcgtcgagccgatgaacatcgtggtgaagatgagcgcctgcaacggccatccggtggcgaagatctccgatacgcccggcaaggcgcaatgccgggaccctgacttcatccactacctcaagcacgtgttccaggtcgcctagggcaagcctggcgcgctgcggcaaggtggcgcatgaggcctggtccttattcggcccatgcctccgacgatctcatcgcccatgaaaaagccccgccaaggcggggctttttcgacaaggagactcagcgcgacaggctggctcccccctgggaaagaccgaacatcagcagcaggatgtccttgttcggctggacctcctggcgcgtcggccgctcggccttgagcgccgaaggcgtcgggcagtactcatgaccgccgctcatctgcaccacgttcggcgcgggttcgtgccaggcggcagccgcggctgtagccacggcgagagcgccgaccagcaacaaacctcgagtgatttctaatttcatgtctgcaaccctttgatggcgctgccaaacgccgtctggtaaccatagatgaaggcttgccactgcgcgccagtccacgacgaacggcgcttcaactgcttcaggtcgtgctgggacgccttgttcaccgtaaggcggcggcggctcttctccaggtcgatcagcgctacttcgatggcctcaccctcgacgcggacgaagatgtgcttcggatagagacaaccgtgctgccagtgggcgagattcatccgggcaatggtagcgccgatttgttgcagaattctttggtgcttcgcttcgccccagcggtcctggtcaccgcgtgcatagcactcgtcgaggctggagaaaccctccagggcttcggtcaccagcagcgcctgccattgcccgtcgaccttgcggcagccggaatagatcaggcgcggcacgcgtataccgagcgactcgaaggcccgtagcgcatcgcgctcgcgcatggcggtgggatagccgaaagggcgctgccagtcgcggtagacgtggccggtctgctgcttgcgatagagcagccgtccatcgccggtgtacacccgctgcacgccgctcgccccgccacggcgctcgttgggctcctcgacccagctgccgggtacctgcaaccactggtcgatggcggagtcgccggagatacgttgcagggatgccagatcgggagccatcgttattcctttcgcaagatatagacccgccacatgtgatacagcgggatgaaatcgagatgcttctggacgacgaagccggcgtcgcggaactcgcgctcgaccgtttcggctggtaatacgaagcggttctggtagccggtctgttccccgttcgctacccgccgtgcctccatgcgcctacgcttccaggccttgaaattgccatcgacccagagggaaaggatcacgctgtcccgcgtgacccggtgaaactcgcggagcaggacgcgtcgatcgtccgcctcgccgatgtggtggagcagccgcatgcagaagatattgtccaccgagctgtccggcaggtcgatggcgaaagcggaagtctgcaagggccgtacccgtttcaccacaccgtccggctggccggcgcaggcgaccgccagcatgtccgcggaattgtcggcgccgatgatcacccggttgtccttttccgccagcagcggccagaagcgtccggcgccgcagggcaggtcgagcaccaggttgggctgccccgcgagcttcagcgcgtgccgggcgagttggacgtcgcgccggtgggaaagtttccgggcgaggccgtcctgatgcttcttcaggtaggcctcagcatgctcgcgatcatacttgtgagaaaagtcgaggtcgacaggcggattgttcatgacgggaactccaggattcatgagacgaacggtatgaatccagccgtcaagctcgggtcaaggggtggtgaatttttcgtcaagcaacatcgagtaaaacttcgaaccggcagccatgcggctccaccgcgctgagggttacgctccagccctcggcggcgcagatccgcttcaccagcgagagcccgaggccaaggccttcgccgcgcccggagctggaactgccgcgaacgaagggcatgaaaatgcgttcgcgttgttcttcggggacgcccgccccggtgtcctcgacgctgaaaccatgctcgtcgagggtcagcgtgatgctcccggcatcggtgtagtgggtcgcgttgcgcaacaggttgcccatcaccgcgcgcagcagtggcgcgttgaactggccggcgcaggcaccttcgttgcggtagtgcagggtcagtcctcgcgcctcgacctgttcgtgccagacctggaccaggtcgtcggcgatgctctccaggctaccgtggggcgccaggctttcctcgcccttctgcgcacgcgccagcaacaggaaggtttgcaccaggtcgcgcatctcctcggtggccttggtcatccgctccagttggccacgggcgcgcgggccgaggctgggttcttcggccagcagttcgcatgaggtggcgatgaccatcaacggcgtacgcaactcatgactgacgtcgctggtgaacaattgctcgcgcttgagcgcgtcgcgcaggcggccaagggtctcgtcgaaggaagcggccagctcgccgacctcgtcgttggcgtagtccggcgccaacggcggcgccagaccgagcaactgttcgcgatgccgcacctggcgcgccaggcgcaccaccggctccatcaccttgcgcgcgagcatccagccaagcaggccggccagggcgatgctcagcacgtagccggtcagcaccgaggcgtagagcacctgctcgcgcgcttcgaaatcgctctggtcctgcagcaggacgaagcggcgaccatcgatgtcgcgcaccagcgcatggaacgacaagtcgccctcgaacacttcgtggaaaccgacatccagttggtccagcgccggcggcatggcgtaggagccctggccgtcgctgatgaagaagcgcatgccgggatcgagcaccgggttgcgtccctgggccaggtcgtcgcgcaggatgcgctccagttcgccgcccaggtcgcgggaaatcaggcgctcctcgatgatgtggaccacgccgacgatgccggcggagaacagtccccccacggcgaccgtcatcagcatgaaggcgatgacgatccggcgggcgaggctctgcttatactccattcggctcctccgccaggcggtagccgacgccatgcaccgtatgcagcaaggccacggagaatggcttgtcgatcacctgacggagttgatggacgtggctgcgcaggctgtcactgtccgggcagtcgtcgccccagaccgcttcttccagggcatcccggcgcaccacatgggggctcttctgcatcagcacggcgagcagctttaggccgatcggattgagcttgagcgacttgcccgcgcgcttgacctccagggtatccaggtcatagctgagatcggccacgctcagctcgcggcggccgccaccctgggcgcgacgcagcaccgcctcgatgcgtgcggaaagttcggaaagggcgaagggcttgaccaggtaatcgtcggctccggaacgaaacccctgcaggcgatcgtccaactggtcgcgggcggtgagcatgatcaccggggtgtcgcgccgtgcgtcttcgcgcaggcgccggcacagggcatagccgtcgattcccggcagcatcacgtcgagcacgatcaggtcgtagtgctcggtggccgccaggtgcaggccggacagcccgtcctgcgcgcaatccacggtatagcccttgagcgacaggtaatcggccaggttggccaggatgtcgcggttgtcttcgaccaccagtattcgcatgtcccactccttcgcaggaagaccgatcgagcgcctctcgcgcatttacggattcttcaccggcgattcacaccggctctacgctcgccaccagagactgcatggcgtcttccatggccgccgatcatagcggctttgcggatgcgcacgaaccccggcggtggatttaaccagcgtcgaagtcaagagaacgtcaacgccagcgttggagatcgcatgacccaggccgccgtccattccccttcccgtccattcaacccctggctgttcctcgccctgccgctgggcctggcggcactgctgctggccttcgagccggtgaccctcgacctcgccctggccaacctgatgtacgacccgggcgccggcttcatcggccggcacagctggttcctggagaacatcctgcacgaccgggtcaagcaactggtgatcgccatcagcgtcctcggcctgctggtctccatcgccggactgttccaccggccatggcgcgcactgagcaggccgctggcctatgtgttcctcgccatgagccttgcagccagcatagtcactccgctcaaggcgctcaccgccgtgcagtgcccctggagcctggcgcagttcggcggcgaggaaacctatagttcgctgctcagcccacggccgccgaccgagcaccccggacgctgctggccgggcgggcacgcatcgtccggattcgtcctgttcgcgctgttcttcgccctgcgcgaccgcaagcccaggctggcgcgctacgccctggccttcgccttcgccatgggctgtctgctatcgctgtcgcgcatgctgcaaggtgcgcacttcctctcgcacaacctgtggacgatgctgttcgactggctgatctgcctcggcctgtaccgcctgatgctctaccgaccggagacgcggggacagcgcaacggcggcgccgacgaaaaccgcgttcaggaagtcgattcgtccgctcccagcacgccgaactcgatgggcaccttcatgtagaacagccgcacgccggcctggcggatcgactcgaacagccgttctgactgctcgggatcgaccgccatgaggatttcctgcggctggtcggccagctcgaagaagtgcatcgaatgcagccggccgctctggccgaagccttcgctggcagccagcgcggtggcaccgcgcacgcccaggcggcgcgcctcttccagcagccagtcgcagatcggctggccctggtggcggcgcccctgctgggtgatgaaggtcagttgatagccttgcatggtcggtcctcccgctgcgctatttgcccagcatccagttcatcgagaacaaccccagcagggtcatcagcaacgagccgctgacgtgcgtcgcgatggccccggcggcccagcccaggcggccctcctgaagcaggctgacgacctcggcggaaaaggtggagaaagtggtcaggccgccgcagaacccggtgatgatcagtagccgccattccggagcgatgcccggcgcctgggcgaaataggcaatcgccgcgccgatgacatagccgccgatcaggttggccagcagcgtgccggggggaatgctgggcagcaggctgttcagcttgagcccgaggaaccagcgcagcaacgcccccagggcggcgccgagggcgatggcgagaatggatttccacatagtcctgtccttgtaggagcgattcggacaggcggcaggcgagcgcctacgcgcctttccaggttcatgcgtaggcatcatcagccccaggggcggttgaaggaggaatgccatctcctgtcggcaagattggcacaaagcgaggcacctatcaaaggccggagtacgccggatcgcccgaagcgtgccagtctagggaacctttccccttccttcgccggagcccccatgcgcccagtcctgctgctttgctgcctgttcctgtccgccaccgcccaggccgaggattgctcgccgcaaacctctgtcggtagctggtgcgagctgccgctcgcggccctccacccgacccagcagaatgtcggcctgctgcaggtcgaggatgaccaggccaagctcgccgggaagaagcccaaggctctcgagcgctacttgcgcaagaaggagattccggtggtgatcggccccggcggccgcttctacctcatcgatcgccatcacctgagtagcgcgctctggcgcctggacccgaaacagggcgtgccggtgaaggtgatcggccggctaccccaggccagcgacttctgggagaagatgcaggaaaaccactgggtctggctgcacgatgcgcgtggcgcggagatcccgcccgaggccctgccggacgctctcgccgggcttggcgacgatccctaccgcgccctggccggctacgccgaggacgagaacgccttcgacaaggatcggcagagctatttcatcgaattccactgggcgcgctatttcggcgaacgcatgcactggcggccgatcagccgcgccactctgcccgacgacctgaagcaggcactgcgcctggcctgcgaaccggcggcaagggagctgccgggctaccgccaggactgcccgcactgaggaataaaaaagccccgccgaagcggggcttttccaaccacaggggccggtcggcttacatcatgccgcccatgccgcccatgtcaggcatgccgcccatggccggcttgtcttccacgatctcggcaaccatggcttcggtggtgatcatcagaccgccgatggaggccgcagcctgcagagcggaacgagtgaccttggccgggtccaggatgcccatctcgatcatgtcgccgtacacgccggtagcagcgttgaagccgtagttgccggaaccctgcttgaccttgtcgaccactacgctcggctcgtcgccggcgttggccacgatctggcgcagcggcgattcgacggcgcgacgcagcagggcgataccgacgttctgctcctcgttgtcacccttcaggccttcgatggcttgcagggcacgaaccagggctacgccgccgccgggaaccacgccctcttccaccgctgcacgggtagcgtgcagggcgtcttcgacgcgggctttcttctctttcatctcgacttcggttgcagcgcctaccttgatcacggcaacaccgccggccagcttggccaggcgctcttgcagcttctcgcggtcgtagtcggaagtggtttcctcgatctgcttgcggatctgcaggacgcgggcttcgatatcagcctgcacaccggcgccatcgatgatggtggtgttttccttgttgatcacgacgcgcttggcgttgcccaggtgctccagggtagcgccttccaggctcaggccgacttcttcgctgatcacggtaccgccggtgaggatggcgatgtcctgcagcatggccttgcggcggtcgccgaagcccggagccttgacagccgcgaccttgacgatgccacgcatgttgttcaccaccagggtggccagggcttcgccctcgacgtcctcggcgacgatcagcagcggacggccggccttggcgacggcttccagcaccggcagcatttcgcggatgttggagatcttcttgtcgaccagcagcagcagcgggctatccagctcggcggccatggtgtccggcttgttcacgaagtagggggacaggtagccgcgatcgaactgcatgccttcgacgacggacagttcgttttccaggcccgagccttcctcgacggtgatcacgccttctttaccgactttttccatggcttcggcaatgatctggccgatggactcgtcggagttggcggagatggtgcctacctgggcgatggccttggtgtcggcgcagggcttggccagctctttcagctgggcgacgatggccacggtggccttgtcgatgccacgcttcaggtccatcgggttcatgccggcggcaacggccttcaggccttcgttgacgatggcctgggccaggacggtcgcggtggtggtgccgtcaccggcagcgtcgttggccttggaggcaacgtctttcaccagttgcgcgcccatgttctcgaacttgtctttcagctcgatttccttggcgacggaaacgccgtccttggtgatggtcggagcgccgaaggacttgtccagaaccacgttgcggcctttcgggccgagggtggccttgacggcatcggccagcacgttcacgccgaccagcattttcttgcgagcggaatcgccgaacttaacttctttggcagccatgttctctttcctctaaatcgaattcggtgaaaacggagtggtgagaccgatcagtcttccaggacggcgaggatttcggactcgcccatcaccagcagttcctcgccatcgaccttgatggcgttgctgccggagtaaggcccgaagaccaccttgtcgcccaccttcactgccagagcgcgcacttcgccgttgtccagtacacgaccggtacctacggctaccacttcaccgcggttcggcttctcggcggcggaacccggcagcacgatgccgcctgcggtcttggtctcttcctcgctgcgacggataacgacgcgatcatgcagaggacgaagcttcatagtcgtaactctcccaaacagtggtttccaacggccggatcgaagtccggcgggttttgttgaagccggcgttgccgggttgcgactcgacgcgcgagccgcgtaagacagcctgcccttgtggcagggaccttgcggtgaccgttacataaggtcgccacaagccatttcaagggcatgcagtgaaattttttttcagttgcgcgaatcgtcgcggcgctcgtactcgccctcgatgacgttcggccgcgacggaccctgtccgtagcgggcgttcaggtcgtcggcgaaggcgcgccggcgcagcgcctgctgttcgacgcggcggcgcaggccgccgagcatcaggcgacgggtgaaaggaatcaggcagaggatgccgaagatgtcgctgatgaaacccggcagcatcagcaggccgccgccgacggcgatcaacaggccttcaagcatttcctgctccggcagttcgccacgggccagtcgttcgcgggcgcgccaggcggtggccacgccggccacgcgcaacaatgcagcaccgatgaaggcgctggcgacgatcaggaacagggtccagccgaccccgatgacactgccgaccttgatcaggacggccagctcgaccagcgggaagagcaacagcagaaagaggaaagcgcgcatttcagagtccttggcggggcccgtttgcccccggtaccaccagtagttggcgccagccggggaagaattcaaccctgctccggctcgacggtaggccagcgctcggccctggccaattgcaccagcgcctggcgcacggccccggggttgccgcaggcggcggggaacggcagccagtgcaggccctggccgatgcgcaggtggaaaccttctgtatcaattcccgccagctgcgccgcggcatgcgccggcagtccggccagttccacatagtgggcgatggcggcggcgtggtcgctgttcatgtgctcgaccatgccgcgctcggcttctccggcgaacggattggccagcggcacgcgctcggcggccagccagtggatcgcgccgaaaccgccgatgaaacgccactggaccggctgcagcacccagaagtcgaaatcgtggacccgatggtagtcggcggactcggggaaatagcggtagtaacgctcggccgccgcggcgacctcctcctccgccaattgccgcgcctcggccagcagggtgaggcggccgacagcctggatatcctcggcgccgcgctcgcctaccagcatcgagcagcgcgggtccgcctgcaggttgtgggtgtgctgggcgatccggctgatcaggatcagcggccggccttcggcatccaggcaatagggaaccaccgagccgaaaggaaagcccggccatttcttcgagtgggtggaaaggaccgcacggtattccttgagcagcaattctcgggcattctttgcagcttcaacgctcaatttatgactccttgcatagaatccgtcgtaaacggacgggcatatcaaagtacgttcgcaggtgccggcaaggtccgcttccagaaactgctcgtggggttccaagcaatgcaattgaaagacaaggtcatcatcatcaccggcggctgccaggggctcggtcgggcaatgggcgaatatctcgccggcaagggcgccaggctggccctggtcgatctcaaccgcgaacgtctcgacgaagccgtcgctgcctgcaaggccgccggcggcgacgctcgcgcctacgtgtgcaacgtggcggacgaggaacaggttacccacatggtggcccaggtcgccagcgacttcggcgcgatcaacggcctggtcaacaacgccggcatcctccgcgacggcctgaccatcaaggtcaaggacggccagttgagcaagatgagcctggcccaatggcaatcggtgatcgacgtcaacctcaccggtgtgttcctctgcacccgcgaagtggcggcgaagatgatcgagctgaagaacgaaggcgcgatcgtcaacatttcctcgatctcccgcgccggcaacatgggccaggccaactactcggcagccaaggccggggtggccgcggataccgtggtctgggcgaaggaactggcgcgctacggcatccgcgtggccggcgtggcgccgggcttcatcgagaccgagatgaccgccgggatgaaacccgaggcgctggagaagatgaccgccggcatccccctcaagcgtatgggcaagccggtggagatcgcccactcggtggcctacatcttcgagaacgactactacaccggccgcgttctcgaactggacggcggcctgcgcctgtaggccccggccccgcaaggaaaaagccccgctatcgcggggctttttcgtgcaggccggcttaccagccgaccccgaggccgaaggtatagcggcgctggttgacgttgccgtcgttgccgctgaacttgtcccattccgccttcatgctcagcgaagcccagctggtcagcttgtagcggatccccgcctcggtctgcagctcgtagtccaggccggattgcagcggcttgctgacctcgccgttggtgaacagctcgaactgcttggccagcaggtagcggttgtagtcccacttgaagctcgacgaatagaagtgctccttctcgccatcggcgaactcgtagtcgttgcggttgaccagggtggcgatggagaacgcgcccagctcgttgtcccagaactggtagccggggccggtaccgacggtacgcttcttcgccaggtcctcgatcatgtcgcgcttgtaggcgacctggccctgccagaaccagtggtcgtcgatgaagcggtccagcgcgtactggccggaataattgtcggtgctgacctggccgttcttcttctcgcggttgtactcgccctgcacgttgtggcgccagagtccgtggcgggcgttggtcttgaaatcgatgtcgtagtcggacacatcgttctcggcctgcttgcggtccagcgagaaatcgacgttgccgttccatacccagtcctggaggatcggcttgggcggcatcatctgctggatgctggccagctccacggtcttcggctcgccgttgaccagggtcacctggcccggcccggcggccttgatgcccttggagtgctcgccagtctcggcatcctgcttgaccagcaggttctgctcgctctcgaaggtggagatcttgtcccacttgagcgtgatgtcgccgccatagtcggtcttcagcagcagcttgccgccgtcgaacagggtgatcttgccggtaaggcggtcaccgttcttcatccagaccgtatcggcaagggcagaggtggaacttgcaagggcagcgaggcacagcaggattctcgacaacatgagcacaaatcaactgagttgggttcgaagaggccggcattatccaaatgccgggcggcagagcaaggaccggggcacgggcggtaaagttcagccggatcgaccgaaaggtgagccgcgtcaccagccgacgccgaccccgatcaggtaatgccggtcggactgggtgcccccctcggtgcgcaactggtccagttcatagaggaacgaaagacgcgcccaactgttcaggcgatagcgcaggccgtattcgctgtcgagcaggtagtcgatccgctcgatgccgggaaccagcacggttcccttgctgtacagctccagccgggtgccggcgagcagccgcttgtagtcccactccagcgaataggaggtgaaatcctcgcgcggctgatcgcgccactccagttgccagcgactgatctcggtgaccaggtcgaaacgcccgagttcgtcgtcccagaactggtagccggggccggttcccagcgcgctctggcgctccaggttgtcgatcgcatcgtgcttctgcgaatagctgccgcgccagaaccagtgttcgtcgaagaagcgatcgaggtcgtagtccagctcccagttgtcctcgaccttgcgcccgtccttcttttcccgctccacttcccccgccagcacgtggcgccaggcaccgtggcgaagccgggtatcgcccttgagcttccattcgtccttgtcgctgtcgttgcgcttgctatccagcttgacgtcgagattgccctcccagaccaggtcctccaccagcggtcgcggcggcaccatctggcgaatactggccagcgggacggtatggctgccgccatcgacgatccgcaccatgcccttgcccgccgcctccagggttcggctacgctgcccggatacgccctgctgcttgatcagcaggggtttgtcggaactgatggtgtcgatatccttccaatcgatcagcacctggccggcataacgggtcttcagcgccagcttgccgccgtccatcagcacgatctcgccggacaggcggtcgccgttgtccagccatacggtgtcggccagcacggggccggccaggagcatcacgacgattgaacagagggctctgagcgacatgggcgttcacaaggcggacaggaaagggaaaaccgatgagcgtgcatgggccggcagcgacccggcaagtgcccaggcgcgccgcgaggccctgtacctggtgctggcgcaggtgccgccggggcaggtggtcagctacgggcaactggccgaactggccggcctaggccgcgccgcccgctgggtcggcaggacgctcagccagttgccggtggatacccgcctgccctggcatcgggttctcggcgccggcggtcgcatcagcctgccggcggacagtcccggcggtcgcgaacaacgcgcacgcttgcgcgaggaaggcgttctcctgcacaacgacaaggtggacatacgtcggcatggctggcttacagcgaagtagagcggttagagtgcgcgttattttttgcggaacggttaccccatgactcagcaatcctggcgagaggccctggtcgcctacaagtctcccgccagcctggccctcctgctgctcggcttcgccgccggcctgccgaccatgctggtgttcaacaccctgtcggtgtggctgcgcgaagccggcgtggcgcgggataccatcggtttcgccagttggctggggctggtgtacgccttcaagtgggtctggtcgccgatgctcgaccagtggcgcctgcccttcgtcggccgtctcggccggcgccgttcctggctggtgttctcgcaggtgctgatcgccctgggactgctcggcatggccctgtgcaatccgcagagccacctgccctggctgatcggcctggccctgctggtggcgttcgcctccgccacccaggacatcgcgatcgacgcctaccgcctggaaatcgccgaggatagccgccaggccgccctcgctgcctgctacatgaccggctaccgcgcggcgatcctgctggccagcgccggcgcgctgattctcgccgaatggttcggctccaccagcctcaactacagccagtcggcctggggcctgacctatgcgttgttcgccctgctgatcctgcctgggctggtcaccagcctgctgatccgcgagccggcggtggacgtgccgatccacgtcaacccgtcgcgtttcgacttcaaccaccaactgctctcggtgctcctgctgctgatcctgctgatctcgctgccggcgatgatcaccgccctcctcgaccgcgcctggccgcgcgccggcctctacgcgctgctcatggggatctgcctgtcgccgtggggacgccagcagatccgcccggtccgcgaactgctcgccaccgtgcgcaggccgctgctggtggcggcgcgcggcaaggaagtgccgctgttcgatttcgtccaccaggcggtctcggtgatggtgctgatcatcctcctcgtcaccgtcaccgccatgtgccgcgcctactactccggcgcctggccgcgcggcacgctgttcctgctgatcgccgcgtcctgcctgtcggcacccggacgcctgctgatggccccggtgctgacgccgatcaccgagttcgtccagcgctatcgctggcaggccctgctgctgctcggcctgatctccacctatcgcctgtcggacacggtgatgggggtgatggccggggtcttctacatcgacatgggcttctccaaggaagtcatcgccagtgtcagcaaggtcttcggcgtactcatgaccctgatcggcgccgccgccggcggggtgctgatcgcccgcttcagcatcctctccatcctgttcatcggcggtgccgcttcggctgccaccaacctgctgttcgccatgctcgcccagctcggcccgctgcacgccgaggccctgcccagccatgacgtgatcagcctggtgatggcgctcgagccgcacgtgctgatgctggtgatgaccatcaccctcgacaacttcagcggcggcctcgccgcctcggccttcgtcgcctacctgtcgagcctgaccaacctgaagttctccgccacccagtacgccatgctcagctcgaccatgctcctgctgccgcgcttcatcggcggctactccggaaccatggtcgagagcctcggctacgagcacttcttctacgtcaccgcggtgatgggcattcccaccctgctgctgatcggctggttgtggctgcgccgcgcgccgtccagcgagacgccggcgccgggacaccagaacgccgagcagcactgaggcgagaatgaaaaaggccggcattcgccggcctttttcgtggatcgcacggacctcagtcggccatcgcgccctgcacaaccttgaccacccgctgcgggaagggaatgccgataccttccttgcccagcgcgtcgcgggccttttcgttgaacatgaacatcacgtcccagtagtcggcgttcttcacccagacccgcagggacagggtaatcgcgctttcgccgagattggaaaccaccgccaccggtgccgggtccttcagaacccgcggatcgtcggccatggccaggagaatgttctgcgcattcttcagatcggcgtcgtagtcgatgccgacgtcgaagatcaccttgcgcagcggctcggcggagtagttggtcaccgttccgttggacagcgccccgttgggcacgatgatccgcttgttgtcgccgctacgcagcacggtgtggaagatcaggatcgaatccacggtgccggccacgccctgtgcctcgatccagtcgccgaccttgaacgggcggaacagcaggatcagcacgccgccggcgaagttagccaggctgccttgcagggccaggccgatggccaggccggcggcgccgatggcggcgacgaagctggtggtctggatgccgatcatggaagccacgctgaccaccagcaggatcttcaggacgatgctcaccaggctgccgacgaagccttgcagggtgcggtcgacgctgcgcctggcgagcaggccgccgacccggccggtcagggtgttgatcagccaccagccgatcgccagggtcagcagcgccagggcgaccttgccgctgtactccagcacgatcggcagccaggactcggtctgctgcaccagtcggtcgtagttcaattccatgcattacctccatttctcgaaaaaacacccctcccttccgcaacggaaacgggacgggcttgcagattcctgcccggacgccgtggggcgacgtttccgggcctggatacgaatcggcgcagcacggacgaaccgacgctgcgccgacaggggcggacaacgcgggagaggtcgcggcggcgctactccctattgcgatgcccgggatggcgagaggttccgaaaaacctcgtcaatcgcggaagttggtgaactgcaacggcatgccgagggattcgccgcgcagcagggcgatggcctcctgcagatcgtcacgcttcttgccggtgacgcgcacctgctcgccctggatggcggcctggaccttgagcttgcgctccttgatcagaccaacgatcttcttcgccaggtccttgtcgatgccctcgcggaagttgacgtcctgcttgaccaccttgcccgacgggtaggcatccttgatctccatgcactggctgtcgaccttgcgcttgaccaggttggaacgcaggatgtcgagcatctgctcgagcatgaaatcggcttcggcggtgagggtcaccgacttgtccttggcttcgaaactgcatttgcctttcaggtcgaaacggcgatccagttccttgatggcgttgtccacggcgttggtcaactcgtgtttgtccagttcggacaccacgtcgaacgaaggcatgtcatctctccagatggacggcgcgacagggttcacagacggaaccgcgcctggcttgacggtaaaaaatgcccgcccattataaccgagccctcgcgagcgaatgcccgccggtgtggcggagaccgacgatttcttcccgatggcgcgcgcgaccgcggccgggacccggcctcccgcgacgaaccgggcccttgccggcagcgtaccggcgcccatcctcttctcgagtccgttcatgcccaaccccgatctcagcatcctggtcgtcgacgacgccaagttttccagcgccatgatcggccgcgccctcagccaggccggctaccaggacatccgcttcgccagcagcgccagcgaggccctgcagcagctcgaacaacgcccggtcagcgtgctcctggccgactggctgatgccggagatggacggcctggaactgaccgcccgggtccgccaactggacgaaagcatcaaccactacacctacatcgtcctgctcaccggcaaggaaggcgagaacgtcctcggcgaggccttcgaccgcggcgtcgacgacttcgtcagcaaggccgcgatgaacgagcaactggtgccgcgcatctacgcagccgaccgcctgtgcaacaccctgcaacggttgctggtggaaaaccgcctgctcaccgaaaacatcgcgcggatggaagaacgcaacctggtggataccctcaccggcctcggcaatccccgctacctgcgacagaagctggccgacagcctgcgccaggtggaaacccgcggtggagcgttgtgctacctgctggtcggcatgcccgaggcaccggtcctgcgccagcggcacggcgaggccttccatcgcgagctgctgctcggcgtggccaggcgcctgcaacagctggtccggccgctggatgtgctggtgcgcctggacgagcagcatttcgccctgatcaccctggtggaggacctgcacgaatgctcgtcgagcagcttcaagcggctgcacgacgggctcaacctgaaggccttcaagaccagcgaaggcttcatcagcctgaaagccggcatcgccatgctcggcctcgacagcggggcattgccgctgggcatcgacgaactgctgcagcgcaccgaggccctgttgcccgatgcctatgccagcggcaggatcgcaacctgccggctaccggcactgcgctagacttcgccctatcgtcagccattcgcagtagccaccatgacctggcatatcctcggcgccggtagcctcggcagcctctgggccgcgcgcctcgggcgcgccggcctgcccgtccgcctgatcctgcgcgaccgccagcgcctgcgccgctaccaacaggccggcggactgagcctggtggaagacggccaggccagcctctacccgatcgccgcggaaaccccggacggcgggcaacccatccagcgcctgctgctggcctgcaaggcctacgacgcggaggaagccgcctccagcgtggcccatcgcctggccggcaacgccgaactgctgttgctgcagaacggcctgggcagccagcaggcggtcgccgcccgcctgccgcgcagccgctgcctgttcgcctccagcaccgaaggcgcgttccgcgatggcgatttccgcgtggtcttcgccggccgggggcacacctggctcggcgatccgcgcgacacaagcgcccccgcctggctggcgcagctgtcccaggccgggatcccgcacagctggagcgacgacatcctcgaacggctgtggcgcaagctggccctgaactgcgcgatcaacccgctgaccgtcctccacgattgccgcaacggcggcctgcggcagcacccggaagagatcgccgcgctttgcgacgaactcggccagttgctccacgccagcggctacgacgccgccgccaggagcctgctggaggatgtccgggcggtgatcgacgccaccgcggccaactattcctcgatgcatcaggacgtcacccgcggccggcgcacggaaatcggctacctgctcggctacgcctgccagcacgggcagcgcctgggactaccgctgccgcgcctgggaaccttgctcgcccgcctccaggcccatctgcgccagcgcggtttgcccgaccgctaaagcgcgttaccctgcccgccattccttttcgccgcggaccgccagagcccatgaacctgcgccagcgcctcgacaacctgcccgtagggcagaaactgctcgccgccctgctgatcctgctggctaccgtgctgctggtggccaacctggcgttcatcagcgccgcctactggatttcccaggagagcgtcgccccccaggcgatgcagaccatcggccggctgatcgccaacccggcgctaagccagccggcactcagttcgccgcagaccgccgaggtcctgctgcgccagctcaacgattaccagccgttgcgcgccgcggccctgtacgacagcaatgggctgatgctggccgacctgcaacgcggcgacaccctcaagctgccggcccgcctggaccgcctggagcactggaggcgcggcgagtaccgcctcaatgcgctgatcgaactgccccaggaaaacgcccgccccggctacctgctgctggtggccagcggtgaactgccaagcgcgttctacaccggaaccctcaccgccagcctggcgatcctcggcgtcagcgtgctgctctggctgctggtggcgcagcagatacgccgcctgatcacccggccgatccgcgatctcgaggaactgtcgcggcaggtcacccgcgaggagaactacgccctccgcgcccagcgcggcaacggcgacgagatcggccgcctggccgacgcgttcaacaccatgctgacccgcatcgaggcccgcgagcagcagctcaagcgcgcccgcgacgatgcccaggaagcggtcgagcaggcccagagcctggccgaggaaacccgccgctcgaaccgcaagctggagctggaagtgcaggtgcgcagcaagatcgagaagaagctcaccggtttccagcactacctcaacagcatcatcgactccatgccttcggcgctgatcgcggtggacgagcaactctacgtcacgcagtggaaccaggaggccagccagctttccggcaccagcctggacgatgcggtcaaccagccggtgttcctcgcctttccctcgctcaagccgttccttccgcagctcacccgggctgccgagaagcacagcgtggagcgtgtcgaacgggtcacctgggcgctgatcgacacgccacgccactacgccctgaccttctacccgctgatgggcggcaccggccgcggcgcggtgatccgcatcgacgacatcacccagcggctgagcctggaagaagtgatggtgcaatcggagaagatgctctcggtcggcagcctcgccgccggcatggcccacgagatcaacaacccgctcggcgcgatcctgcacaacgtgcagaacatcaagcggcgcctgtccccggagctggcgaagaacgtcgagctggcggccgaggtcggagtgccgctggaagacatcaatcactacctcgacggccgcgacatcccgcgcctgctggaaggcatccagcacgccggctcgcgggcagcgaagatcgtcacccacatgctcgccttcagccgccgcagccaccggcagatgaccgcttgcgaactgcccgcactgctcgaacaggcggtggaaatcgccggtaacgacttcgacctggccgaaggcttcgacttcaagtcgttgcagatcgtccacgagttcgaccccaacctcggcccggtgccggtgatcgccaacgaggtcgagcaggtcctgctcaacctgctgaagaacgccgcccaggccatccaccagcgcgacgacgaagaggaaggcgaacagggtcggatcgtcctgcgcacgcgcctgacgccgccctgggcggaagtccaggtggaagacaacggcagcggcatgcccgaactggtgcgcaagcgtatcttcgagccgttcttcaccaccaaggaagtcggccagggcaccggtctcggcctgtccgtctcgtatttcatcatcaccaacaatcacaagggccagatggaagtacgctcggaactgggccgcggcacctgcttcagcatccgcctgccgctggaaagctccgaagcggtcgccccggcacaagccaaggccctgccgcccgctctgccgcaacccggtagcagcctgcggcggggcgacgaagaggaaggttgaatccatgggcaatcgattgtcgaagatctacacccgtaccggcgaccgcggcgagaccggcctggccggcggacgccgggtgcccaagagccatccacgcatcgaggcgatcggcgcggtggacgaattgaacagccagttgggcctgctccttgccgagctgctggaagcgcgtggcgcacatcccggcctggaggagatcgtccaggcgctggcgccggtgcaacaccgcctgttcgacctcggcggggagctggcgatgccggagtatcgggccctggacgagacggaagtggcacgcctggaaagctgcatcgaccgctggaacgacgagctgggcccgctgaagaatttcatcctccccggcggttcccgcctggtcgcccaggcccatgtctgccgcagcctggcgcgcagtgccgaacggcgctgccaggcgctggaccaggaggaaacgctggagggcgtcggcctgcgctacctgaaccggctctccgacctgctgttcgtcgccgcccgcgccatcgcccggcgccagggcgtggcggagattctctgggaggcggcggcaaaaccggactgacggcgagcgagggctcggcatcgagacgaaaaaaaggaggccgaagcctccttttttcttcattccaccgtcaaaggccgcccggccagaacgcacggatacccgccacgccctgggctccatgctcccaagcctgctcggcttgctgcggaccgaggccacccagcaggtagaccggctggttgaagccggcgatcagttcggcggccttgtcccaacccagcgccggctcgccgggatggctctcggtcggctgtaccggcgaaagggtgacgaactccactcccatcgaggcagccagggccagttcctccgcgtcgtggcaggaggcggccagcaggcgcccttcggggaacggccgaccggcgctggcgtatttgcgcagttgagcggaggtcaggtgccaaccggcagccgggaagtcgcccagccactccagcgggcctttcagcatcagttgcgccttgccggcgcagagtccctggatatcgatggcgagatcgcggtattcgggactgaacatgttcggcgcgcgcaactggatcaggcggatgcccgcctccaccgccttgcgtacgccgctgatcagctcgcccggctccaatccgtccggggtgatcaggtagtgcgccggcaggcgcgcggcctggacgatcggcgcgttggcggcggggaactcgtagtcggccagctcgcgcggctccacccaggccagcggttggccctcggcgccgtgggcttcgccggaaaacccgtcgacctcccagacatcgagcaggacgtgcttgtcggcatagtcgtgccggacctggatcagcggccgggcccgctcgacacggatgcccagttcctcttccagctcacgggccaacgccgcgcgcaccggctcgccgtcctccaccttgcccccgggaaactcccacaggccgccctggtgcttgtcttccggccgccgggcgatcagcacccggccatcggagccacgaatcacggccgcggcgacatgtactcgtttcacggatcatctcctcgctactgccgtcacgcaccgcaagcggcggacggccatcaactaccggcctgctcgcgcaatgccgcgtcgtaccaggcgcggaacgcaggccactgataaatcgtctcgacataggtccgggcgatatccggcaactccaccgcataactgcggaaacgcgccgccaccggtgcgtagaacgcatccgccaggctggcgtggccgaacaggaacggaccgtcctggccgaagcgccgccggcaatccgcccaggcttcgcagatacgttgaatatcctgtcgtgtcgcctcggacaattccaccaatggctgctggcgccgcaggtccatcggcagctcgccgcgcaacgcggcgaaaccgctgtgcatttccgcgcaaaccgaacgggccagcgcccgcgccgcctcgccgcgcggccacaggtgggcctcggggaagcgctcggcgaggtactcggcgatggccagggaatcccagatgtcgccatcctcgcttttcagcaagggcaccttgccggtcggcgaatattgcaggatccgctcccgggtatcgggccgccccagcgggacgaggatctcgtcgaacgccgccccgctcatgcgcagggccagccagccccgcagcgaccaggacgagtcattgcgattgccaatcacgatggtcagggccatgcgcctctcctcttcggccgcccgacgcggacggccatgcaccagagaacttaagaggcgcacggaccgatggcaaattcccgattttcatccatcgatgaaggatcggaatgcctggcttcaggtgcggtactctgcgttgatcttcacgtattcgtgggacaggtcggtggtccagatggtctcgctgcaggtgccgcgtcccagttcgatgcggataccgatctcggcctgggccatcaccgccgcgccctgctcctcggtgtaactggccgcccggccgccacggctggcgatacagacgtcgccaaggaacacgtcgatcttgctcacgtccagattggccacgccggcacgtccgaccgcggcgaggatgcgtccccagttcgggtcggaggcgaacagcgcggtcttgatcagcggcgagtgggccacggcatagccgacatccaggcactcctggtgggtggcgccgccgttgacctgaacagtgacgaacttggtcgcgccctcgccgtcgcgaacgatggcctgggccagctccatggaaacctccagtaccgcttgcttcaacgcggcgaacagcgcgccgctggcctgggtgacttccggcagcgccgcgcgaccggtggcgatcagcatgcagcagtcgttggtggaggtatcgccgtcgatggtgatgcggttgaaggacttgttggcggcgtcgcgcaacagatcctgcagcacgccctgggcgaccttggcgtcggtggcgatataaccgagcatggtcgccatgttcggcttgatcatcccggcgcccttgctgattccggtgacggtcacggtcacgccatcgtgcacgaactggcggctggcgcccttgggcagggtatcggtggtcatgatccccgcggcagcttcggcccagcggtcctcggccaggtcggccagggccgcaggcaacgccgcctcgatcttggccaccggcaggggctcgccgatcaccccggtggaatatggcagcaccgaagtctcggcgaccccggccagttcggcgagcttggcgcaggtttgcgcggcggcggcgaggccggcctcgccggtaccggcgttggcgttgccggtattggtcagcaggtagcgcacctcaccgaggaaacgctgtttggccagggtcaccggcgcggcacagaacgcgttcagggtgaacaccccggccacgctggagccttcggcgcagcgcatgaccaccacgtctttgcgccccggtcgcttgatgccggcggaagcgatgccgagttcgaaaccggggaccgggtgcagggtggacagggggccaagaccgacagccatgggaacgcgctcctttaccaaacagtggactcgatgccgtctgcgacggcgtgacggaaaacgcatcggcgccgggctggcgccaattcgaacaaacgccgcgagcggcaggaccggtcgcggcgttggtgaaccaggcgggaagcttagtccagctgcccgtggcagtgcttgtatttcttgccggaaccgcacgggcaaggctcgttgcggccgatcttctgctcgttgcgcacaggctcgagcggcacgaccggagccgggccctcgggaagctcttcttcctcgccggccacggcctgctccatcgagggagcctcggcgtgctggaactgcatgcgcttggccagttcctccgcctcgcgacgcaggcgggcctcctcttcggccgggtcttcgcgacggacctggacgtgggacagcacgcggatggtgtcgcgcttgatcgagtccagcagctcctggaacagggtgaaggactcgcgcttgtattcctgcttaggattcttctgcgcgtagccacgcaggtggatgccgtgccgcaggtggtccatggtcgacaggtggtccttccacaggtcgtccagcacccgcagcagcatctgcttctcgaaggcgcgcagggcttcggcgccggccagctcttccttctcgtagtaggcggcgacgatctgctcgaggatcttgctacgcagggtttcctcgtacagcttgtcgtcttcgtccagccactgctggatcggcaggcgcacggcgaagtcgctgtacagcgcagcctccaggccttcgatgtcccactgctcgggcagcgactgcggcggaatgtgctggttgatggtggcgctgagggtttcctcgcggaattccttgatggtctcgcccacgtcctctgccgacagcagggtattgcgcatgtggtagatcaccttgcgctgctcgttggctacgtcatcgaattccagcagttgcttgcggatgtcgaagttgcgcccttcgaccttgcgctgggccttctcgatggcgttggtcaccatgcggtgctcgatcgcctcgccggactgcatgcccagcgccttcatgaagttcttcacccggtcggaggcgaagatccgcatcaggttgtcttccagcgacaggtagaagcggctggaacccgggtcgccctgacgaccggcacggccgcgcaactggttgtcgatccggcgggactcgtggcgctcggaggcgatcacgtgcaggccgcccgcctcgatcacctgctggtggcgcttctgccattcggccttgatctgggcgatctgctcctcggtggggttctccagggccgcgacttcgacttcccagttgccgccgaggaggatgtcggtaccgcggccggccatgttggtggcgatggtcaccgaaccgggcgcgccagcctgggcgatgatctcggcttccttctcgtggtacttggcgttgagcaccttgtgctcgatgcctgcctcttgcaacagcttggaaacgtactcggaactctcgatcgacgcggtgccgaccaggatcggccggccgagggcctggcactgcttgatgtcggtgatgatcgccgcgtacttctcttcctgggtcaggtagaccaggtcgttgaagtccttgcgcgcgatcggccggtgggtcgggatcaccaccacgtcgagaccgtagatctggcggaactcgaaggcctcggtatcggcggtgccggtcatgccggccagcttgttgtacaggcggaaatagttctggaaggtggtggaggccagggtctggctctcggcctggatcggcaggccttccttcgcctcgatggcctggtgcaagccctcggacaggcgacggccaggcatggtgcggccggtgtgctcgtcgatcaggaggatctggtcgccctggacgatgtactcgacgttgcggtggaacagggtgtgcgcgcgcagcgctgcgtaaacgtgggtcagcaggctcaggttgtgcgccgagtagaggctctcgccttcgccgagcaggccgttctggctcagcaggtcctcgatgaactggtggccctgctcgttgagttcgacctggcgggtcttctcgtcgatgctgtagtggccttcctcggtcggcttgccctcgacctcttcgacctggcgcttgagacgcgggatcagcttgttgatcttgatgtacagctcggagctgtcttcggcctggccggagatgatcagcggggtacgcgcctcgtcgatgaggatcgagtccacttcgtcgaccacggcgaagttcagctcgcgctggaacttgtcgtccaggctgaaggccatgttgtcgcgcaggtaatcgaagccgaattcgttgttggtgccgtaggtgatgtcggcggcgtaggcggcgcgcttgtcttccggcggctggaagggagtgaccacgccgacgctgaggccgaggaactcgtacagcgggcgcatccagttggcgtcgcggcgcgccaggtagtcgttcaccgtgaccacgtgcacgcccttgccggacagcgcgttgaggtagaccggcagggtgcccaccagggtcttgccctcgccggtacgcatttcggcgatcttgccgtcgtgcagggtcatgccaccgatcagctggacgtcgaagtggcgcatgcccatcacccgcttaccagcctcgcgaaccacggcgaaggcttcgggcagcaattggtcgagcgtttcgcccttggcgtagcgctgctggaattcagccgttttcgccttcaactgctcgtcggagagcgccaccatctggggctcgagcgcattgatggcctgtacagccttggccatgcgctttacatcacgctcgttcttgcttccaaagagtttcttcaacaaaggcgcaaacatatcgacttggtcatccacacgtggggaatggaaggctcacccatccggcggcccgtgccgatcaacggcatgaaagggaacattctacccggaaacgggtatgagaaaagtacagcagatcaatgcgcgtcgctcactcggaaacagacgcgcgtgcgatgaagctttgcggattcattacccggccatccttcatcacttcgaaatgtacgtggtagccggtggagcgtccggtgctgccgaccttggccagcacctggccgcgcttgaccaggtcaccgacctcgaccaagttcttctggttatgggcatacaacgtggtgtagccatcggcgtgcccgacctcgaccacgttgccatagccgttcttgcgcccggaccaggtcaccacccccgccgccacggccaccacgtcgctgccggccggcgcggcgaagtcgatgcccttgtgcatgctcaggcggccgctcaccggattgacccggcgcccgaacggcgaggagatgtagccctggcgcaccggctggccggccaggtaggtcgactggctgatgtgcttgtcggcgagcagttgctccagcacctcgagctgctgctcgcgggtatccaggcgtgccgccagttcgtccagcgtcgccatgaacgacggcggggcataggcgctgccctccagcggttcgtcgacgccaccctggccgacgctcagggagaagtcgaactcgtcggggtcgacgtcggccagctcggtgagacgttcgccgagggcatccagccgaaccaggcgcgcctgcagttcgccgagatgcacgctcagtgcgtccatctgccgctgcgcgtcctcgcgggcgctgctgatctcggcgctctgcgcctgcagcgcggcatcgacttcgatgccggccaccggagccggcgcgcggaacagccaggcgcccaggaagcccccggccaacaggctggcaccgaccacgcaggccccggccagcatcagcaaccgcggctgcagatggacggagcgagcggccccatggtgccggctcagaaaaatgatgtgcatgacttatccttcatacgggccggcagtagcgaaacgctttctgctaccattccgactcagtaacccccaggcttcccgccatgtcttttcgtcccttgcccgcccaggcatcgacccagttgctgcgccaggccaggccgctgcagatgctgttcgccgaagcccagcgcatctgccgcctgcagcaactgctggaaagccagttgcaaccggcggcgcgcccgtactgccatgtggcttcgtggcgcggcggttgcctgctgctgatcgtcaccgatggccactgggccacacgcctgcgctatcagcagcggcgcctgcagcggcagctgcaggctttcgaagaattcgcgaacttagcgaaaatccttttcaaggtgcaacccaccacgtccacacaacgtgcggcacgtcgcagcttgaccctgtctgccgtcgcggcggaaaaccttcgcgaatccgccgagatcgtcggcaatccacgcctgcgggaagcgctcgagcggttggcaagccgcgccgagaaaagccggcaagaataaatcccgaaataaaaagaggccaccctgaggtggcctccaaatatggaaaggagagttttcctacactgccgccgccgggcgcatataggaaataggcgcggtacgcgcgtcttcgaaggtcaccacttcccaagcatccttgtctgcgatcaacgtacgcagcagttggttgttcagggcatggccggacttgaagccacggaactcgccgataagactgttgccgagcagatacaggtcgccgatggcatccaggatcttgtgcttgacgaactcgtcctcgtaacgcaggccgtcttcgttgagcacgcggttctcgtcgaccacgatcgcgttctccacgctaccgccgagtgccaggttctgcgaacgcaggtactcgatgtcgcgcatgaacccgaaggtacgggcgcggctgacctccttgacgaaggaagtactggagaaatcgaccgaggcctgctgggtgcgaccacggaagaccggatgatcgaaatcgatctcgaagctgaccttgaagccgtcgaacggaacgaagacggcgcgcttgtcgccctcttccacgctgacttcgcgcttgatgcggatgaacttcttggcagcttcctgctcttgcaatccggcggactggatcaggaatacgaacggaccagcgctgccatccatgatcggcacttccgaagcggacagctcgacgtaggcgttgtcgatacccaggccggccatggccgagagcaggtgctccaccgtatccactttgacgtcacccttgaccagggtggtcgacatggtggtttcgccgacgttctcggcccgggccgggatttccacgaccggatccaggtcggtgcggcagaacacgataccggtgtccaccggcgccggtttcagggtcaggtaaaccttttcccccgagtgcagaccgacgccagtagcccggatgatgttcttcaaggtgcgttgtttgatcatggctttggccgcttaagcgctgactgcgaactgttttcaacaatggccggcgatgatagcagaaccggcctttgctgaacaccaatcacatctctactcctgattaattacttcaatcggcctgacgacgcaggaacgccgggatatccaggtaatccaggtcatcctgcgggttcagcttggccgcggtcgccgcgctgccgtgagactggttgcgcatcacggtaggacggtcgaggtcgcggtagttcaccgactgctgctcgcgctgggccggagcggctgcctgggctgcactgccctgcacggtgttgtcgacgaccttcaccggtttctccaggcgcgcgcccaggccggtggcgactacggtgacgtgcagctcatcgcgcatgtccgcgtcgatcacggtgcccaccttcacagtggcgtgctcggaagcgaactgttcgatgatgttgccgacatcggagtactcgcccagggacaggtccggacccgcagtgatgttcaccaggatgccgcgcgcgccctgcaggttgacgtcttccagcagcgggttgcggattgccgcctcggtggcctcgcgggcacggttcggaccgctggcgcagccggtacccatcatcgccatgcccatttcgctcatgacggtcttcacgtcggcgaagtcgacgttgatcatgcccggacgcttgatgatgtcggagataccgcgcacggcaccggccagcacgtcatcggccttggcgaaggcggccagcaggctggcgtccttgccgaggatggtcagcagcttctcgttcgggatggtgatcagcgaatcgacgctctcggccagcgcgcggatgccctcgtcggcgatctgcatgcgcttgcgaccttcgaacgggaacgggcgggtcaccaccgcgacggtgaggatgcccatttccttcgccacttcggcgatgatcggcgcggcgccggtaccggtgccgccacccatgccggtggtgatgaagaccatgtcggcgccttccagcacttcggaaatgcgctcgcgatcttccagagccgcctgacgaccgacttccggattggcgccggcacccagccccttggtgacgcccgggccgagttgcagaacggtgcgcgccgcgatgttcttcagcgcttgtgcgtcggtgttggcgcagatgaactcgacgccctcgacgttgttcttggccatgtgattgacggcgttgccgccaccaccacctacaccgatcacttttatgacggcggtttgtgcgatgttatcgaccagttcaaacatttcccctctccttcctttctagttttgtcgcctactgttaccgcgttgaatcagaaattgccctggacccagcgtttgagccgctccaggacaggtgccttgggttcgtcgctgctgtagctgctgcctgacacagacatcgacatgccatcggactgcttctgcagtccgtacatcagcaggccgacgcccgtcgaatagatcgggttgcgcaccacgtcggtgaggcccttcacgctatacggcacgccgaggcgtaccggcatgtggaagatttcctcggccagctcgaccgcgccttccatcttcgaggtgccgccggtgaggacgatccctgccgggatcaggtcctcgtagccgctgcggcgcagctcggcctggaccagggtgaacagctcgtcgtaacgaggctcgaccacttcggccagggcctggcgcgacagttcgcgcggcggccggtcgccgacgctgggcaccttgatggtctcgccggcaccggccagcttggccagggcgcaggcgtagcggatcttgatctcttccgcgtactgggtcggcgtacgcagggccatggcgatgtcattggtgacctggtcgccggcgatcgggatcaccgcggtatggcggatcgcgccttcggtgaagatcgcgatatcggtggtgccgccgccgatatccaccaggcacacgcccagttccttctcgtcctcggtcagcaccgaataggccgaggccaactgctcgaggatgatgtcgtcgacctcgaggccgcagcggcgcacgcacttctcgatgttctgcgaagcattcaccgcgcaggtcaccacgtgcaccttggcttccaggcgcaccccggacatgcccagcggctcgcgcacgccttcctggttatcgatcacgtaatcctgggccagggtatgcagcacccgctggtccgccgggatcgccaccgcctgggcggcatccagtacccgttcgatatccgccgggttcacctcgcgatcgcggatcgccacgatgccgtgggaattgaggctgcggatgtggttgccggcgatgccgacgaacgccgagtggatacggcaaccggccatctgctgggcctcgtcgatggcgcgctggatcgactgcacggtggactcgatgttcaccaccacgcccttcttcaggccgcgggacggatgagtaccgatgccaacgacctccagctggccatcggccgtcacctcgcccaccagcgccaccaccttggaggtaccgatgtcgaggccgacgatcatcttgccgctctgcacgcttgccatggttattactgtctcctcaactcactgcacggcgctggccgtggccaccgtcgcgggcgtgaccggctcgcgccacgcaacggcgaggccgttggggtaacgcaggtcgatccgcgcaatgttcgaaatctgatctttgagtgccttgtcgtagatgcttacgaagcggcgaatcttgtctaccacgtggtcgcgcccgatctggatctcgacgccctgggccgtggtcagcgcccaaccgccgcgatcgctcatttccaggcgggcgatggagaacccgaggggacgcagcaactggctgagcaactggtattgctgcatcacctgctgttgcgcccgctgtggaccatgcaagcggggcagatgttcataattcgccagttcctttggcgtaaaagcctgtccctggttgttcagcagcgcttcgtcgccccaccgcgcgatcggcagttgctcgtccaggcggatcaccacctggtccggccacacccggcgcacctcggcgtgggcgatccagggcatctgttccagttgcccgcgcatgcccgccaggtcgatggtgaagaagctcgccgccaggtacggggagatccgctgctgcaccgcgcgctggctgatgtagctgaggtcgccctcgacactgaccttggcgatcggccggtcggcgtacggcaggatgtactcggcgccgcgataggcgccatagccgagaacggccagcaacagcggccaggccaggtacttgaggaaactgaagtcggctttcggcaggcgcacgctcagcggttccttggccaccagacggctggcgccgcgcggcatcggcttgcgcggagcgcggccgagtccaccgggttgctgatgacggagcagtacgccattcatggcttatcccctcgcctcgcggctatcggccaggatcgccagcaccagttgctggaaatccaggccggcggcccgcgcggccataggcaccaggctgtggtcggtcatgcccggtgcggtgttgacttcaagcagccagaaacgccctttggcgtcctgcatcacgtccgcccgcccccaaccctggatgcccagggcgtcgcaggcgcgcgcggtgagttccttcagctcgcgttccttggcctcgtcgagaccgcagggcacctggtagcgggtatcgctggccaggtacttggcgtcatagtcgtagaaggtgtgcggcgtgcccaggcggatcgccggcagcacctgcccgcgcaaggtcgccacggtgaattccgggccgctgatccactgctcgaccagcacctgcgagtcgtagcgggccgcttcgcgccacgccgcgatcaattcgtcgagcccgccgaccttggccatgccgatgctcgagccttcgtgagccggcttgacgatcagcgggaaacccagtcgctgcgccgcttcgcggcagtcatcctcgctggccagcaccgcgtagtccggggtcggcaggccgaggctgagccagacccgcttggtccgcagcttgtccatcgccagcgccgaggccagcacgccgctgccggtgtagggaatgcccgcgcactcgagcaggccctgcatgctgccatcctcgccgccacgaccgtggagaatgatgaaggcacggtcgatcttctcctcgaccaggcgttgcagcaggtcttcgccgacatcgatgccgaaggcatcgaccccggcggccagcagggattgcaggaccatcgcgccggacttcagcgacacctcgcgctcggcgctcttgccgccgaacagcacggcgacacggccgaacgccttgggatcctgggtgccgttcagcaggctatcgaggcaaaggttcatgcgcccttccctcccttgccggcgaacagcgggttcttgatcagttgcggggccaggccgccgacatcgccagcgccctggcaaagcaggatgtcgccagcgcgcagcagcggcttgaccagcggcgccaggtcggcgtcgcgctcgaagtagatcgggtcaagctggccgcgctggcggatgctgtggcacagctggcggctgtcggctcccgggatcggctcttcgccggccggatagacctccatcaacagcagcacgttggcttcgcccagcacctgcacgaagtcttcgtacaggtcgcgggtacgggtatagcgatgcggctggtagaccatcaccaggcgacgctccggccaaccgccacggatcgccttgatcaccgcggcgacttcgcgcggatggtggccgtaatcgtccaccagcatcacgctgccaccctcgacctgcagctcgccgtagacctggaagcgccggcctacgccctggaagccggacagcccctggacgatggcttcgtcggagatgccctcgtcggtagcgatgacgatggtcgccagggaattcagcacgttgtgcaggccgggcatgttcaccgagacgtccagcggctcgcgctccgggcgcaacacggtgaaccaggtgcgcatgccttcctggcggatgttgatcgcgcgcacgtcggcgtcttcgctgaggccgtaggtcacggtcgggcgggcgatctgcgggaggatctcacgcacaaccggatcatccacgcacatcaccgccagtccgtagaacggcaggttgtggaggaactcgacgaaggtcttcttcagcttgttgaagtcgccgccgtaggtcgccatgtggtcggcgtcgatattggtgaccaccgcgaccatcggttgcaggtgcaggaagctggcgtcgctctcgtcggcctcggccaccaggtagcggctggcgccgagctgggcgttggtcccggcggcgttcagccggccgccgatgacgaaggtcgggtccaggccgccggcggcgaacaccgaggagatcaggctggtagtggtggtcttgccgtgggtgccggctaccgcgatgccgtgccggtagcgcatcagctcggcgagcatctccgcacgcggcaccaccggaatccgccgttccagggccgatgccacttccgggttggcccggttgatggcactggacaccaccagcacgtcggcgccgtcggcgttttccgcctggtggccgatgaagatctgcgcgccgaacttctccaggcgctcggtcaccgccgaggccttgaggtccgagccggatacctcgtagccgaggttcagcagcacttcggcgatcccgcacataccggcgccgccgatgccgacgaaatggatgcggcggatacggcgcatggtccgggtgacgccattcggttctttaaccacgggccacctccaggcaggcatcgaccaccgtccgggtagcctcgggtttcgccaggctgcgtgcctggtctgccatggagcgcagggtttcgggatgcatcaggacctcggacagctgcgcggccagttcggccgcgccggtagacttttgcggcagcaggcggccggcgccgctgcgtaccaggaattcggcattgcgggtctggtgatcgtcgatcgcgtgaggcaacggcaccaggaaggcgggcaatcccgccgccgtcagctcgctgacggtcagcgcgccggcgcgacagatcaccaggtcggcccaggcataggccgcggccatgtcgctgatgaagggcgcgacgtccgcttcgaccgccactgtgcgataacgctcggcggtaatctcggcatgctgacgaccggcctgatggcggattgccggacggatttccagcggcacctgcgccagggcctctggcaacagcttgttcagcggttccgcgccaaggctgccgccgagcaccagcagattgacccgacggccggtcagcggcgcgcgggcgtgcgcgtcgaggaatagctcgccgcgcaccggattgccggtggtcagacgcttgtcactggccgggaaggtatccgggaatgcctcgcagacgcgcctggcgatcggcgccaggctgcggttggcggtgccggccacggcgttctgctcgtggatcaccagcggcacgccattgaggcgcgcagccaggccgcccgggccggtgacatagccacccaggccgagcacgcagaccggcctcagctggcggatcacccgcagcgcctggaacagcgacttgagcagttccagcggcgccttgaccagcgacttcaggcccttgccgcgcagcccgctgacctgaatcaggtgcaacggcaggccggccttgggtaccaggtcattctcgatgccgcgcggcgtccccagccagtgcacggcatagccgcgcgcctggaactcccgcgcacaggcgagcgccgggaacacgtgtccgccggtgccacccgccatgatcaggacattacctttcatcggcaaagtcctcttcgttgaactcatattcctcgctacccaggtgggttcgccgttcccattcgatgcgcagcaacatccccagacaggcacagcagatcaccagcgaactgccgccgtagctgaggaacggcagggtcaggcccttggtcggcagcaggccgacgttcaccccgatgttgatcaggaactggccgatccagaggaaggccaggccgtaggccacgtaggcggagaagaactgcttggcctgctcggcccagatgccgatgtacagcgcgcgcaggctgacgaacacgaacagggcgacggtcgccagggcgccgacgatgcccagctcctctgcaagcacggcgaagacgaagtcggtgtgcgcctccggcaggtagaactgcttctggatgctgttgcccagtcccatgcccaaccagccgccgcggccgaaggcgatcagcgcctggctcaactgatagccggcgccgaactggtcggcccaggggtcggtgaagttggtcaggcgtgccatccggtagggctgggtctggatcagcaggaccaccgcgccgaccgccagcagcaccatcaggccgaagcggaacagccccaccccgccgaggaacagcatggccgcggcagcgcccatcattaccacggtggcgccgaagtccggctcgcgcagcagcaggccggccatcggcagcaacaccacgaagggcttgaagaagcccatccagctttcccggacctcctgctggcggcggatcaggtagccggccatgaagatcaccacgcagaccttggcgatctccgaaggctggatgttgaacaggccgaagccgatccagcgcatcgagccgttcacctcgcggccgataccgggggtgatcaccagcaccagcaggccgaaggcgaccagcaacagcttccagccccaacgctgccaggtggccatcgggaccatcatggtcaggccgcaggaaatcaggccgatcaccaggtagatcaggtgacggacggagaagtacagcgggttgcccgactgcgccgccgccacctcggaagaggcggaagtcaccatcaccaggccgaggccgagcagcgccaggcaacccgccagcagcgggaagtccaggtcgatgccgtgccggctcaacagcggcgacgggaaggggcgcaacaccgacagcatcacgctagctcctctacggctttggcgaacaggcgtccgcgttcttcgaagttcttgaacatgtccaggctcgcgcaggccggcgacaacagcaccgcatcgccttcgcgggccagctcggcggcctgccggactgcttcgtccagcgttgcgacgcgcaccagcggtaccgcgttgcccagtgcctgggcaatcagcccggcgtcacggccaagcagtaccaccgcccggcagaagcgcgcgaccggctcgcgcaggtcatggaaatcggcgcccttgccgtctccgccggcgagcagcaccagcttgccgtcgatgtcggcacccagcccctcgatcgccgccagggcggcgccgacgttggtggccttggaatcgtcgtagtagctcacgccctgccgctcgcgtacccactggcagcgatgagccaggccggaaaacgccttcagcgcgccgagcatggcgtcgaacggcaggccgaccgcatggcccagcgccagcgcggcgagcgcgttggaatagttgtgggcgccacggatcttcagttcgccaaccggcagcagcttgtcgaactggaacgccagccacttctggccgtcttcctcgatcaggccgaaagccttgaagtccggcttgttcaggccgaacgaccagcacggcacggtatcggcgatcagcggtcgggtcagggcatcggcgcgattcaccacgacctggcgggcaccgcggaagatccggtgcttggccaggtggtagtcagccatgccgtcgtagcgatccatatggtcttcgctgacgttcagcacggtcgccacctcggcgttgaggcgatcgcaggtttccagctggaagctcgacagctccaacacgtacagctcgatgtcgtcggccagcaggtcgagcgccggggtgccgaggttgccgccgacggcgacacgcttgtccgcggccaccgccatttcgcccaccagggtggtcacggtgctcttcgcgttggaaccggtgatggcgacgatcggggccttcgcctcgcgggcgaagagatcgatgtcaccggagatgcgcacgcctttcgcggcggcctgtaccagcgcgggggtgcgcagcgacaagccggggctgacgtagagttcgcgggcggagcagaggaactcggcgtcgagttcgccgcaacgcacttccacctgcggatactgggcacgcagggtggccagctccggcgggttctctcgggtatcgaccacggcgaaaggcaagccgcggcgcgccaggtagcgcaccagggacatgccgctcttgccgaggccgacaacgatgcggaagtggtcggaggcgatcaggctcatgctctcttcgtcctcaacgcagcttcaaggtggcgaggccgatcagcaccaggatcacggtgatgatccagaagcgcacgatcacgcgcggctccggccagcctttcagttcgaaatggtgatggatcggcgccatgcggaagacgcggcgtccggtcagcttgaaggaagcgacctggatcatcaccgagagggtttccatgacgaacaccccacccatgatgaacagcacgatttcctggcgcacgatcaccgcgatggtgcccagcgcggcacccagcgccaacgcgccgacgtcgcccatgaagacctgcgccggataggtgttgaaccagaggaagccgaggccggcgccgaccagcgcggcgcagaacacgatcagctcgccggcgcccggtacgttgggaatcaacaggtactcggcgaacttcacgttgcccgacaggtagcagaagatgcccagcgcgccggcaaccattaccgtcggcatgatcgccaggccgtcgagaccgtcggtgaggttcaccgcattgctcgagccgacgatgacgaagtaggtcaggaccacgaagaagatgcccaactggatctcgacgctcttcagcatcggcacgatcagggtggtctcgatcggggtttcggcagtcatgtagaggaacacggcggcgccgatgccgaacaccgactgccagaagtacttccagcggctcggcaggccacgggagttcttctcgatcaccttgcggtagtcgtccacccagccgatggcaccgaacagcagggtaacgaccagcactacccacacgtagcggttggaaagatccgcccacagcagcgtgctgatggctatggcggtaaggatcagggcgccgcccatggtcggggtgcccttcttcgacaggtgcgactgcggaccgtcgttgcgcacggcctggccgatctggcggatctgcaaggtacggatcatccagggccccagccacagcgacagcgacagcgcggtgagcacgctgagaatgccgcgcagggtcaggtactggaagacgccgaagcccttgtagaactgttgcaggtattcggccagcagcaggagcattagtgactctcctcggaggaaccgcacagcgccgcgacgactttgtccatcgccgcactgcgggaacccttgatcaaaatggtggttgtcggttgttcggtggccagcgccccgatcaggctggcctggtcggcgaagtgccggcccgtggcgccgaacgcctgtacggcgtgggccatcagcggtccgaccgcatagagcgcggacaccttgccagcggcgtaggcgcccacctcgcggtgggcctgctcggcccaggaaccgagttcgcccatgtctccgaggaccaggacggtgcgcccggaaaagccgctcagtatatcaatcgccgccagcattgacgcggggttggcgttgtagctgtcgtctatcacacgcagcccgctggcggtcagttgcgctaccgcgcggcccttgaccggctgcagcgcctgcagcccggcgacgatcccatccagcggcacgcccagtgcatgggcggcagcggcggcagccagggcattggcgacattgtgccgccccagcaggttgagctggacctgcgcttcacccgctacgccctgcagcctgaagcccatgcagccacgcgcatcgcgttgcagatcggcggcgcggaaatcggcctggggccggtcgagggagaaagtcagcaacggacggccgctggcacgggccttccaggtgtcgaaggccttgtcgtccaggttcagtacggcggtgccgtcggcggccagcccttcgagtatctcgcccttcgcctcgacgatcttctccggtccgccgaactcgccgacatgggcggttccggcattggtgatgatcgccacgtgcgggcgggtcagctcgaccgtgtaggcgatctcgccgatgcgcgaggcgcccagttcgatcactgcgctacggtgctgcggcgccagttgcagcagggtcagcggtacgccgaggtcgttgttcagattgccacgggtagccagcaccgactcggcatcgccggcctgggtacgcaggatgctggcgagcatctccttgaccgtggtcttgccgctggagcccgtcatggccgccagcgggccggtgaacttgcgccggttcagcgcgcccagtcgccccagggccgcacgggtatcgcgcaccagcaattgcggcaggggcgcgtcggcgacttcgcgctccaccagcgcagccaccgcgcccttggcggcaacctcggcgagatagtcgtggccgtcgaaacgcggcccactcagggcaatgaacagttggccgggcccgatggcgcgactgtcggtggaaaccgccgaaaagacggcgtcctcgccgatcaggcgggcgtccagcgcgaccgtcaactggctgaggcgaagaggctcaagcatgcggcacctcccaggcggccagggcgcgctcggcctgctcgatgtcggagaacggatggcgtacgccgtcgatctcctgataatcctcgtgacccttgccggccaggagcaccacgtcatccaccgcagcggaagcgatcagatgggcgatcgcctcaccgcgcgacggcaggaaggtaaccttgtcagcggcagcgaagcctttgcggatatcggcgatgatcgccgcactggcctcggtgcgcgggttgtcgtcggtgaccagcaccccatccgccaggcgttcggcgatcgcagccatcagcggacgcttgccggcatcgcgatcgccaccgcagccgaacaggcacagcaggcgcgcggccgcgtgcggacgcagggcctccaggactttttccagggcgtcgggagtatgcgcgtagtccaccaccaccagcggcttgtcgccgcctcccaggcgctgcatgcggccgaccggcccctgcagttgcggcaaggtgcggaggatatcgcccaggggataacccaggccaagcaacgcaccgaccgccgccagcaggttgctcaggttgaagcggccgagcaacgggctgcgcagcaggccctcgccgtgcggagtgaccagcgccgcctcgatgccggcgtcgccgaagcgcgcttcgcggcaatagaggaacgccgagctgtcggtgaggctgtaggtgatcagctccgagtcctgctcctcgccggccagtcgacggccgaaatcgtcgtccaggttgatcacccggcagcgcaggcccggccaggcgaacagcttggccttggcggcggcataggcttccatcgaaccgtgatagtcgaggtggtcgcgggacagattggtgaacaccgcgatatcgaaaccgagcgccgccacgcggccctggtcgaggccgtgggaagacacttccatcgctaccgcgcgggcgccggcctgcttcagcgtggccagcgtggcctgcaccgcgagcgggtccggcgtggtgtgccggccgctctccagggcgccgtagaaaccggtgccgagggtgccgacgatgccgcagcgctcgccgagcagatccagggcctgggccaccagttggctgacgctggtcttgccgttggtgccggtgacgccgatcaggtccagcccgcggctcggctcgccgtagaaacgcccggcgaccgccgacagttgcgcgaccagccccttcaccgcgatcagcggcgcatcgctgggcggcagctctcctgcgccttccgcctcgtaagccacggcagccgcgcccttggccagggcatcggcgatgtgcgcacgaccatcctggcgcccgcccggcaccgccaggaacaggtcgcccggacgaacgccgcggctatccagggtcagctcgcggatcagcagatcgcgctcggcctggggaaacagttggttcaggctcataggcatcagccacgccctccttttgcgggcgcagcattgacctgctgctgttcggtggccgtcggcaggttatccggcggcacgttcatcaggcgcagcgcgccagccatgaccttgctgaacaccggcgccgacaccaggccgccgaagtagcccgccttgctcggctcgtcgatcaccacgaccatcgcgatgcgcggatcggtggccggggcgaaaccggcgaacagcgagcgataggcgttttcccggtagcccttggtgccgaccgagaccttgcgcgcggtcccgctcttgccggcggcgtggtaacccggcacctgggcgcggaacaccccgccctgggcctcgaccacttgttgcagcatgccctgcacggtggaagccacttcaggcgagatcacctgcacaccatccggcacgcggtcgactcgggtcatgctcagcggcacgctcttgccgtcgttggccagggccgcataggcatgcgccaactggatcgcggttaccgagagaccgtagccgtaggccagggtcgcggtttccgccttcggccacttgcggtggttgggcaggttgccgacgcgctcgccggggaagcccaaccccgtgtcctgcccgagaccgacctgttgcatgaccgagtagatggattcggcgccgatgtcgaaggcgatcttgctgatgccgacgttgctcgacttgatcaggatgccggtgagatcgagttgccgcgaattgcgcgatacgtcgcgaatggtgtagcggccgatctgcagggtgcccgggtagacgtcgacgatatcgctgggtttccagcgcccgctggccagcgccgcgctcatcgagaacggcttgaccgtcgagcccggctcgaacacgtcgatcatcgcccggttgcgcatggccgccggctgcaggttacgacgattgttcgggttgtaggtgggctggttggtcatggccaggatctccccggtcttcacgtccatgatcaccaagctgccggccttggcgccgttttccagcagagcgttgcgcagttcgcgatgagccaggtactgcaggcgcaggtcgatggacagcgcaagggtcttgcccggtttggcattcttggtgacctgcacgtccttgatcacgcggccacggcgatccttgagcacctggcgcttgcccggcacgccggccagccattcgtcgaaagccagctcgataccttcgcgaccgcggtcgtcgacatcggtaaagccgaccgcatgggccaccacttcgccagccgggtagaaacgccgaaactcctcgatggagtacacgccgggcaccttcagggcgatcacgccttcgccctgctccggggtcagcccacggaccagatagatgaactcgcgctcggcgttctgctcgatgcggtcggcgaacagcttggtatcctgcccgagcgccgccgccagttgcggccagcgttccttggcggtcatcagctccttggggttggcccacagggtggtgaccggggtgctcaccgccagcggttcgccgttgcggtcagtgatcaggccccggtgcgcagggatggcgatatgccgcacgctacgcgcgtcgccctggcccttgaggaagtcatggtcgatcacgtgcaggtcgacgattcgccagacgatggcgccgaccatcgccagcagcaggccgacgatcacgcagaaccgccatgggtagagggcgccctggaaataattcagtttcatggcgccaccatcctgacctcggccgggtcgggaacgcgcatgcgcaactgttccaccgccaggctttcgatgcggctatgggcggtccaggtgctctgctcgagaatcaaccggccccactcggcctgcgccttgtcgcgcacgctcagctcggaatacagcgagttgagcagttgccggttccagtaggtgctgtaggccacggcaatcgccgagagcagcagacctatataaagcagcaacatgaggaagctgccggtaggcaggcgcttgacgaagagacggctcatctcagcttctccgccacgcgcatgaccgcgctgcgcgagcgcgggttggccttgagttcttcttccgaagcgtactgcggcttgcccagcagcttcaggcgcggctcgaagaccttggaacggatcggcaggtcgcgcggcaggttgtccgcctcgcccttggcgtgcttgcgcatgaacagcttgacgatgcggtcttccagggaatggaaactgatcaccaccagccggccgccgacggccagcgattcgagcgcggcgtcaaggccacgctcgagatcgcccagctcattgttcacatggatgcgcaggccctggaatgcgcgggtcgccggattcttgcccttctcccaggcggggttggcaaccgtgatcacttcggcgagatcggcagttcgttcgaacggccgctcctgacggcgctgcacgatggcgcgggccatccgcttggcgaagcgttcttcgccatattccttgaagacccgggcgatttcctcttcggtggcgttggcgatgaactccgctgcgctgatgccctggccgggattcatgcgcatgtccagcggaccatcgttgaggaagctgaagccgcgctcgggatcgtcgagttgcggcgacgacacgccaaggtcgagcaggacgccatcgacccgcccttcgagaccgcgtgcgcgcacctcatcgcccagttcggcgaacgagcgctgcacaatgacgaagcggccgtcttcggccgccaatgcttttcctgtctggatggcctggggatctttgtcgaatccgagcaggcgtcccccggcgcccagtttctcgagcaaggctcgactatggccccctcttccgaaggtaccgtccagatagcagccgtcctcccgcggggccagtgcggaaacggcctcctcgagcagaacggtgatatggcggtaggtggcattcatagtcaaaggatcaggtcgcgtagttcgtccggcagcccaccgggttgtttgattgccgccaggtcggcttcagccatggcgttccaggcatcctcatcccacaactgaaacttgttcagttgccccaccagcatcgcccgcttgtccagcttggcgtactcgcgcaggcgcggcggaatcaggaaacgcccgtttccgtccagttccagatcgacggcattaccgatcagcagccgctgcaggcgccgcgtttcttctcgcaaagaaggcagctcgcgcagcttggcttcgatcagttcccattcgggcaaggggtaaacggtgaggcaggggtcgactgcgtcgatagtgacgatgagctggccggcacaacgcgaaacgagctcgtcacgataccgactcggcatcgcgaggcgccctttggcgtcgagacttatggcattagctccgcgaaacacgtcagcgcttcccctgtggttggctttccatgccaattgatcccacttttacccacttcataccacttctgcacactatagaaatccacactccccaccgtcaaggcgcgtcagaagtgaaaaatccttacaggacggagatttagcgtgcttttggaaggttgcggagcgcttttagaagtaaaagagatgacaaaacacaataagtccaaagtcttagccttcgaacttaaagtgatttatcaagagttgcggcttttcgcttttgcgacggacggataaaaccgggaaaaagcgaagagagtgggaagaagtgggagagtcgatctataagccgggttctgtcgaggacagccattcctctgggacgcacatcactgtacgcctcaagcgacctacccgaatccaacgcgggccgcgccaatggattcctatttggtcttgctccgagtggggtttacctagccacgcactgttgccagccgtgcggtgcgctcttaccgcaccttttcacccttaccggcgctgttgcgcttaggcggttattttctgtggcactttccgtaggctcgcgcctcccaggcgttacctggcactctgccctatggagcccggactttcctccaccgcgctattgcgcgacagcgactgtccaatcgactctccgccgacaaggttagcgggagcaggcgcgaagaacaagctcaactcttcccttggcgttgcaaagcctgttgatacaaaaggttttttcgcaccccggtaatttccgccgccagcgccgcggctttcttcaacggcagctcggcaagcagcaggtcgagcaccctgagcgcctccgcaccgatcgactcctcgccttccggcgcctgccaccccgccaccagcacaacgcactcgccgcgctgctggttgctgtccgacgcgacccaatcgtgcagttcggccaacggcaggctgcgaatggtctcgaaggtcttgctcagctcccgcgccagcaccgcacggcgctccccgccgaacacgtcgcgcatgtccgccaggctttccagcagacgatggggcgcctcgtagaaaatcagcgtgcgcggctcttcctgtaccgcctggaggcggctgcgtcgtcccgcagccttggcgggcaggaaaccttcgaagatgaaccggtccgacggcaatcccgccgccgacagcgccgcgatcagcgcgcaggagcccggcaccgggaccacccggatacccagcgcctgtgcctggcgcaccaggtggaagccgggatcggaaatcagcggggtaccggcgtccgagatcagcgcgacgtcctccccaccctgcagccgggagatgaagcgcccgccctcctcgcgctcgttgtgctcgtggcaggccgccaatggcgtctcgatgccgaagtgctggaacagccggatcgaatggcgggtatcctccgcagccaccagggccacctcccgcagcacccgcagggcgcgcgggctgatgtcgtcgagattgccgatcggggtcgccactacgaacagagtgcctgctgacacgaaaatacctcgggagctatctgaaaaggcggcattgtatcgcgattcagggtgccgccatcgcacccgaggcgggcctccggtacaatcggcgactcttcgtgaatgcgccatgagaagccctatatgatcgcttgcctgcgtccgctttctgctctgatcctggccggtctgctgaccgcctgcgcgacctcgtccaattccggactgggcgaacttccccgtacgccgaatgccagcatcgagcagttgttgcaacaggccagccagagcaagcccgaggaagcggcgctgctgcgcctctcggcagcggaccttgcctaccagcagaaggacctcgccaggtccaccgccatcctgggacagattccgctggaaagcctgaagccggcccagcaggtcttcgccagcaccctgaacgccgaactggccctcgcccgcagcaagcccaaggccgccctgcaggcattgcagcatccgagcatgcagcatctcagcgaactgccggtgacccagcaggttcgtacccagcgcgccaaggcccaggccctcgccgccgacggccaggtccttgccgcagccaaggagcgcatctacttcgcaccgctgctcgagggcccggcggtgatcgagaaccaggaaaagatctggaccctggtcagcagcctgccggtcgaccagttgcaaccgagcgccaacgaagacgacctcagcggctggctgaccctggcacgcatcaccaagacctcgccgaccctgcagcaacagcaggccagcatcgagagctggcaacagcagaaccccgagcacccggcggccaagcacttgccggcggcgctggagaaactcaagacgctgtcccagcagccgctgacccgcatcgccctcctgctaccccagcaggggcagttggccaacgtcgcccgggccctgcaggacggcttcctcgccgcccacttccaggcccagcaggccggccagaatcctccttcgatcaagctctacgacagtacccaggtgcgctcgctagatgacttctaccgccaggcccaggccgatggcgtcgaactggtcgtcggtccactggagaagccgctggtcaagcaactcgctagccgcgagcaactgccgatcaccaccctcgcactcaactacagcgacaacagccaggaaggcccggcgcagctgttccagttcggcctcgccgccgaggacgaagcgcgcgcggtggccagccgggcctggggcgacggcatgcgccgggccgtggcgctggtgccgcgcggcgaatggggcgaccgcgtgttggccgccttcagccagagctggcagtccgcgggcggcagcctgatcgccgccgagcatgtcgaccagccggtacaactggcgcaacagatcgccgacctgctgcaactgcgccagagcgaaggccgcgcccagcgcctgcagggcgccctcggcagccagatcgccacccagccgtcgcgccgccaggacatcgacttcgtgttcctcgccgccaccccgcagcaggcccgccagatcaagccgaccctggccttccagtacgccggcgaccttccggtctacgccacttcgcacctctacaccgggaccaacaacccgacccaggaccaggacctcaacggcatccgcttctgcgagaccccgtggctgctcaaccccagcgacccgacccgccagcaggtcgccgcccaatggccccaggccaacggcagcatgggccgcctctacgccatgggcgtcgacgcctaccgcctcgctccgcgtctgcctgaactgaaggccgtgccgagcctgcagatcgacggcctgaccggtaccctgagcctgaatccgacccaacgtatcgaacgccagttgcaatgggccgagttccgcaatggccaggtccagccgctggggaccagcagcttttgaccgatagggaaagctcccgggacaaggggcgccaggccgaggaactggcctgcacccatctacggcgacagggccttgccacacttggcaagaattggacctgtcgccgcggagagctcgatctggtcatgctcgacggcgatacagtagtattcgtcgaagtccgctcccgccggcatcgcgcctggggcggagccctggagagcatcgacgcgcgcaagcggcagcgcctgattctctccgccgaactttttctgcaacaggaggcgcgctgggccaaacgcccctgtcgcttcgatgtggtcaccgtcgataccagcgacggacaatcaccaccgcgactggactggattcagaacgcattcgacgcctgatcagccgccccaccgaaggtcattaccgatggacatgcaacaccgtatccgccagctcttccaggccagcatcgagaccaagcagcaggcgctggaagtactgcctccctatatcgagcaagccagcctggtgatggtcaatgcgctgctcaacgagggcaagatcctctcctgcggcaatggcggctcggccggcgatgcccagcacttctcctccgaactgctcaaccgcttcgagcgcgaacgtccgagcctgccggccgtggccctgaccaccgacagctcgaccatcacctcgatcgccaacgactacagctacaacgaagtcttctccaagcagatccgcgccctgggccagccgggcgacgtcctgctggcgatttccaccagcggcaattcggccaacgtgatccaggccatccaggcggcccacgaccgcgagatgctggtggtcgccctgaccggccgcgacggtggcggcatggcttcgctgctgctgccggaagacgtggagatccgcgttccttccaagatcaccgcacgcatccaggaagtccacctgctggccatccactgcctctgcgacctgatcgaccgccaactgttcgggagtgaagaatgagccgtaccgccttcgtcgccgccaccctggccctgagcctggccctgggaggctgcagcagtttcctcagcgccacccgggacaaaccgatcgacgacgatcgcgggacccgaaccatcggcagcaagatcgacgactcgctgatcgagaccaaggccgcggtgaacatcgccaaggccgatccggccctggacaaggactctcacatcgtcgtggtcagctacaacggcatcgttctgatcgccggccagaccccgcgcgccgacctcaagagcaaggccgaacaggccgcgcgcacggtgcagaaggtcaagaacgtgcataacgaactgcaggtgacctcgccctcctccctgctcgcccgcaacaacgacgcctggatcaccaccaagctgaagacccagatgctcagcgatcccaacgtgccctcgtcgcggatcaaggtggtcaccgagaacggcatcgtctacatgatgggcctggtcaaccagcaggaagccgcccaggctgtccgcgtcgcccagggcgtcgacggggtgcagaagatcgtcaagctgttcgaatacataaactgaagaacagcgaacgaaaaaaaggcgatccttcgatcgcctttttcattgctcgccgtttacttgaccaccttcagggatggcctgccactgggacgcggcggctcatcggacggtccgccatcgtcatcgcccggctcgtcgtccaccggacccggctgctccagatcgaagaccatgccctgtccgttttcccgggcgtagatggccattaccgccagcgctggaatgtacaggctctgcgccacgccgccgaaacgcccctcgaagctgaccgcctcgttgtccatgtgcagatgccgcacggcagagggcgagacattgagcacgatctgcccatcgctggcataacccggaggcacctttaccccggcgaactctgcgttcaccaggatatgtggcgtgcaatcgttgtcgacgatccattcatagagcgcgcggaccagatagggacggctggaattcatcttcatgttccttaacgcatatctcgttcaacggaagacaggctggcccggaagctttcccgggcgaatccgcgctccatgtagtcgagcaacggcttggcctgccgcggcaactcgatgcccagcaacggcagacgccagaggatcggcaacaggcagcaatccaccaggctgaaatcctcgctgaggaaatatgccttgtcggcgaacagcggggaaaccccggtcaggctctcgcgcaactccttgcgcgcctggacccgctcggcctccttgctgcgcgcatccaggatccggtccaccagggaacaccagtcccgctggatacgatggatcaacaggcggctgttggcacgcttcaccggataatcgggcagcagcggcggatgcggatagcgttcgtcgaggtattccatgaccaccgtcggctcgtacagcgccaggtcgcgatcgaccagggtcggtacgctgccgtaggggttgacctccgccagcatcggcggacagcggcccgcctcgatatcgatcacctctaccgccacgttcttctcggccaggaccaggcggatgcgatggcagtaatgatcggcagggtcggaatagcaggtcagcttgttgattgaagccatggagccctcctcgcaggtcgacttgtgggaggtgaaaagacgcgcgcgccccgtagggcgcgcgcttcgaagaccaacgtgcgggttagtgcacgtccttccagtactcgcgcttgaggagataggcgaatacgaagaagaaggccaggtagagcaggacgtaggtaccgatacgctcggaggccagcttgttcgggttggccgaataggccaggaaggtcaccaggttcttgaccttctcgtcgaactgggcttcgttcagctcgccggtcttcggcaccacggtcaactggtcacaagcttcgtgagtcagcggggtaccggtcaacggatcgaactgcttcttgccatcctcgaccacctgtacctgcttgcagccgatcacctggcgtccctgcaggggcgccaggacgttcggcatgccgacgttggggaagatcacgttgttcacgccccacggacgcttgggatcctcgtagaacgagcgcaggtagctgtacagccagtcggtgccgcgtacgcgggcaaccagggtcagatccggcggagcggcgccgaaccaggtcttggcgtcggccggcttcatgccgatgtccatgtggtcgccgatcttggcgccggtgaacaccagcttctccatcatcagatcggcaggaatgcccaggtcggtggcgacacgctcgtaacgctggaacttggcgctatggcagcccatgcagtagttggcgaaggtacgcgcgccatcctgcatggccgccttgtcggtcaggtcgatatcgacatgatccagttgcggcccatggccgccagcggcgaaacccaggactggcagtaccgccagaatcagtgcagcgaattgctttttcatcagccagtcaccctttccggaaccggtttggtcttctccatccgggtgtagaacggcatcaggatgaagaaggcgaaatacaggacggtgcaaacgcgcgacagggtagtacccagcgggctcggagcctgggcgccgtagtagccgaggatcacgaaggacaccgcgaagatcaccagccacagcttgctcagccagcccttgtagcggatcgagcgaaccgggctgcgatccagccacggcaggacgaacagcacagcgatcgccgcacccatcgccaccacgcccatcagcttgtccggaaccgcgcggaggatcgcgtagaacggggtgaagtaccagaccggagcgatgtgctcgggggtcttgaactggttggccatctcgaagttgggcttctcgaggaagtagccgcccatttccgggaagaagaagatcacggtgcagaagatgaacaggaacaccaccacgccgacgatgtccttcacggtgtagtacggatggaacgcgatgccgtccagcggtacgccgttctcgtccttcttcttcttgatgtcaacgccgtccgggttgttcgaaccgacttcgtgcagcgccaggatgtgcagcacgaccaggccgagcaggacgatcggcagggcgatcacatgcaaggcgaagaagcggttcagggtgatgccggagatcaggaagtcaccgcggatccactgggccaggtcttcgccgaccaccggaatcgcgccgaacagggaaatgatcacctgggcgccccagtaggacatctgaccccaaggcagcaggtagcccatgaaggcctcggccatcagcgccaggtagatcagcatgccgaagatccacaccagctcgcgcggcttctgataggagccgtagagcaggccgcggaacatgtgcaggtagaccacgatgaagaacgccgatgcaccggtggagtgcatgtagcgaatgatccagccgtagtcgacatcgcgcatgatgtattcgacggaagcgaacgcctcttcggccgacggcgtgaagctcatggtcagccagatgccggtgaggatctggttgaccagcaccagcagcgccagggagccgaagaaataccagaagttgaagttcttcggtgcgtagtacttgctcagatggtcttcccacatcttggtcgcgggaaaacgcgcatcgacccaagccatgaacttgttcatcaggctttctcctggtccacgccgatggtgatgacgtcgtcagcatcgaacgtataaggcggaatcggcaggttcagcggcgctggctggcctttgtagacacgaccggcgaggtcgtagtgggaaccgtggcaagggcagaagtagccgcccttccagtccggaccgaggtcggcgggggcgacttcgggacggaaggtcggcgagcagcccaagtgggtgcagatgccgacgatcaccgccagttccggcttgatcgagcgaagcttgggatcgacgtactccggctgctccgaggccttggagtccgggtcggccagttgtccttcgaggctcggcagggcgtccagcatctccttcgtgcggtgcacgatgaatacaggcttgccgcgccattcagcgatgatctgctgacctggatcgatcttgcccacgttcacctgcaccggcgcgccagcagccttggctttggcactggggaaccatgaccctacgaacgggaccgcagcacccaccgctcccgccgcgccaaccacagaggtggccgcgacgaggaagcgacgccggcctgcattcacgccgtcattactcattcagtcgtctcccatcagcttcagacctgttctaatcaggcctttaagtaaaaattcgagccgcgcaaaaaattcgccaaatggtaaagaaaaccccctttgatgacaaggtaatagcctgacacaaaacgcccgaaacccttgtagggcgcgcccttcggccatgcgacaccttgccgcagagttaaagcgtagacataaaaaaacgcccagctccgaagaggtgggcgtttttcagcaagcgtcgaattaacgcttggagtactgcggacgcttacgcgctttacgcagaccgactttcttacgctcgacttcacgggcatcgcgagtcacgtagccggccttgcgcagcgagctacgcagggtttcgtcgtactcgatcagggcacgggtgatgccgtgacggatcgcaccggcctgaccgcttacgccaccgccaacgacggtaacgaagatgtcgaacttctcgacggtctcggtcagctcgagcggctgacgcacgaccatgcgagcggtttcacgaccgaagaactgatcgagaccacggttgttgatggaaatcttgccagtacccggacgcaggaagacgcgagcggtagcggtcttacgacggccagtgccgtaattttgagtcgccgacataatgagctatcccgttaaatcttcagttcttggggctgctgagcggtgtgcgggtggctggcacccttgtacaccttcagcttgcgatacatatcgcgacccagagggttcttcggcagcatgccttttacagcggtctcgatgacgcgctcaggggccttggcgatcagcttctcgaagttgatcgacttgatgccgcccgggaagccggagtggtggtagtacatcttgtcggtggtcttggcaccggtcacacgcacctgctcggcgttgatgacgacgatgtagtcgccggtgtcaacgtgcggagtgtactcaggcttgtgcttgccacgcaggcggcgggcaatttcggtcgccagacgacccagggtctggccggcagcgtcgacgacgaaccagtcgcgctgtacagtttccggtttcgcggtataggttttcattcgttatagcctcaggggccgcctgaaaataagacggcgaatcttactggacaggggttgccttgacaagtcaaggacagccgaaaacagacacgaattggggctcgggtcggtgtgcgtccgtaacgactagatacatcgatcggcaggcttggcatcccccaccgatgaaaggctgcggaattatgcagatttcgccagaatttacaaccgcattaaccacttaatttcacgaggacacccgcatggagtatcgcccgctcggccgcaccgatctgaaagtcagcgccctctgcctcggcaccatgacctggggcgagcagaacagcgagcaggacgccttcgcccagatcgccagggccaaggccgccgggatcaatttcatggataccgccgaaatgtatccggtgccgccccgcgccgagacctacgccagcaccgagcgcatcatcggcaactggttccgccgcagcagcgaccgcgccgactggatcctcgccagcaagatcgccggccccggcaacggcatcagccatgtgcgcgacggcaacctcaagttcaaccgccagcacatcgtcgccgccctcgatgccagcctggagcgcctgcagacagactggctggacctctaccagttgcactggccggagcggcggaccaacttcttcggccagctcggctaccagcaccaggaagagagcttcacaccgctggaggaaaccctggaagtgctcgacgagcaggtgcgcgccggcaagatccgccacatcggcctgtccaacgagacgccctggggcaccatgaccttcctcaggctcgccgaggagcgcggctggccgcgcgcggtatcgatccagaacccctacaacctgctcaaccgcagcttcgaggtgggcctggcggaaatcgccatccgcgagcagtgcggcctgctggcctactcgccgatggccttcggcatgctttccggcaagtacgcggacggcgcccgcccggccaacgcgcgcatcagtctgtacagccgcttcacccgctacaccaacccgcaggcggaagcggcctgcgcgcgctacgtagcgctggcccgcgaacatggaatggaaccggcgcagatggcactggcctacgtcacctcgcggccgttcgtgaccagcaacatcatcggcgccacctcgctggaacagctggaaaccaatctcggcagcgtcgacctgaggctggacgaggaattgctcgccggtatcgatgcaatccaccgggagcaaccgaacccggctccctgagcctccaggggcctggcgctgccgcgggttcggcggacaaccgcgcgatgcggtcgtccgcccctcccggtgaccaggcgcgcctcacagggcccgcgcgatgatctccttcatgatctcgttggtaccggcgtagatccgctgcacccgggcatcggcccaggcccgcgccaccggatattcccacatgaagccgtagccgccgtgcaactgcacgcattcgtcgagcaccttgcattgcaggtccgtcgtccagtacttgcacatggcggcggtgggtacgtccagcttgccctggagatgctgctccatacagcgatcgacgaagacccggccgacctggatctcggtagccatctcggcaagcttgaagcgggtattctggaagtccgccaccgacttgccgaacgccttgcgctcgcgagtgtagtcgagcgtccattgcagggccgcctcggccgacgccagcgcgccgataccgacggtcaggcgctcctgcggcagctcctgcatcaggtagatgaatccctggccgtccttgccgagcaggttctcccggggaatccgcacatcctggaagaacagctcggaggtgtcctgggccttcatcccgaccttctccaggcgcttgcccttgctgaagcccggcgtacccgcctcgaccacgaacaggcttatgcccttggcgccagccttcggatcggtcttcgccaccacgatcaccaggtcggcgaggaagccgttggtgatgaaggtcttcgagccattgatgacgtactcgtcgccatccagtaccgcagtggtcttcaccccttgcaggtcggaaccagcccccggctcggtcatggcgatggccgcgaccatctcgccggataccagcttcggcaggtacttgcgcttcagcgcctcgctgccgtagtggaggatgtagggtgcagcgatgtccgaatgcagggagaaaccgatcccggtcaggccggcccgaccgatctcttcgatgaccacggcgctgtagaggaagtccgcgcccatcccgccatactcttccggcaggtgcgaacagagcattccggcctcgccggccttgttccagagcgcgcggtcgacatgcccatccttttcccattggtgatggaaaggcacggcttcctgttcgaggaacttgcgcacgctgtcgcgaaacagttcgtggtcggagctgaacagggttctcggtatcatcgtggtcacctggaaacggtctgggatcgggttggctgcacgcggcaggtcttcgactgtagggaaatgccctgaccgacgcactggacagttgcgccaaaaaataagacgatccagccgccttttgaccgctttcccttactcacaacaacgataaaaatccatgcgcgctcaatccgctccggtgctgaaacatgtcggcatcgtcgccatcgacggcgtcttcgcctcgaccctgatgcaggccaaggacttcttccacatggccagcctgcgccacggcaagcagcagggcctcggtctccagccggccttccgcacccgcatcctcagccccgacggccagccggtacgcagcttcagcggcgacagcatcgccgtcgacggtcccctcgccgcctgcgatatcgtggtcctgcccgccttctggggcgatttcgacgcgctcgaacggcgctatccgcaaatcgttccctggttgcgccgcagccatgccgagggaaccgccctctgcggcgaggcgaccggggtcttctggctggcccaggcaggtctgctggatggcaaggaagcgaccacctactggcgcttctatcgagaattcgccgaacgcttcccgaacgtgctgctcaatcaggagaagcacctgaccgatgccgacgacctgttctgcgccagcggcgtcacctccgcctgcgacctctacatctatctgatcgagcgtttctgcggcggatcggtggcccaggcggtggcccgggataccctctacgaagtacagcgcagctacaccccagggcgcatcggcttcggcggacagaagctgcaccatgacccgacgatcctgcagatccagcaatggctggaagaccacttcgccgacaagttccgtttcgaggacgtcgcccgcgaccacggcatgagcatccgcaacttcatgcggcgcttccaggccgctaccggcgacaagccgctgcactatctgcagcgactgcggatcgagaccgccaagggcatgctctcgagcacgcgcaagagcatcaagacgatcagctacgaggtcggctacgacgacgccagcttcttcgcccgcctgttccgccagcacaccgaactctctccccaccattaccgtcgccagttcatgcagaaggaaagctgagccggacttcgccgggcctgcccgaacggcatcggcgccggcgcgtttcctacagaacctaggataggtagccaggtcggccttcgcgggttctcatgaatccgcaggcccgccgcagacgcgggcgttccgaacaacgacaagaacggacctttgccatgcgcctttatctgctcgccttcctggccctcttcggtatgaatgctatggccgccgacaactggaaagccttcccctacgaccagagcgcctatgactatccaggcgacaagttgaaggaagcctggccgcgcctgacccgcggcttcggcgactatccctatccggacgccgactgggtggtgaacatggcgaccgcccatccggatgccctggaaaagaccgtgaaggccggcaccggcttcaccggcaagccggaagaggccgcgcaatatgcggcacgactgcaggatgtctggcgcctgctgttccgcggcgactacgccaaggccaaggagcagggactggccctgggagtcggcggccaggtaccggcgatgttcgcccaggtgctctacgccatgttcctggctcccgaccaggcggagaaacagcgcctgctcgaagaagtcatcgactacaccgaacaggccggcccgctggtcaaggccgatatcgtcgcccagttcggcagcgtctacgccaaggcgcgcctggccgaggagctatcggtaccggtagtgctcaagcgcggctataccagcgaaatacccaaggaactggacgctctcctggccaggcaacccaaccagccgttcgccctggcgctctacggcggctacgaggcgggagtgatccgcaaggtcggcaagctggtcggcaagatgacctacggggtcagcgccgacaagatggagcagtacttcgcccgctccttccgccaggccaacgacctgccgatcggccactacgagtacgccaacgcgctgacctacgtatacggcgacaacgagcgggagaaggccatcgcccaactgaagcaggccgtggcgatcaagccgatcaacgccatggaagccctcgaagtggcccatgcgaagaagctcctcgccggcttcgagcagaacaccgcgcagcgctgaaacgccgcgcgcccatgaaaaaaggggtggccatcggcaacccctttctcgtttccgccccggatcagggccggtgcggacgcgtcaggtattcgtgggactgcatttccagcagacgactgagggtgcgctggaattcgaactccagccggccgccgctgtagagatcctttagctcgacctcggcggagatgatcagcttgacgctgcggtcgtagaactcatccaccaggttgatgaaacgccgcgccatgtcgtccttggtgacgcccatctgctcgacgttggagatcagcacggcgtggaaaatcttcgccagttcgatgtagtcgttctggctgcgcgggccgtcgcacagctcacggaattcgaaccaggccacgtcgtcgcaggtcaggcgcgcgcggatctcgcggttctcgatcatcagcgcctcgtcgcgctgggccttggcacagtccggggtcagggccttgaagctgcgcgccatctcctcctcgacctgttcgctgagcggccagtggaacagctcggcctgctccagcgcgcgcaggcgatagtcgacgccgctatcgacgttgacgatctcggtatgctccttgagcagggcgatcgccggcaggaaacgggcgcgttgcaggccgtccttgtacaggccgtccggcacgatgttggaggtcgccaccaggctcacgccgttcttgaacagctcttccagcagggtggcgaggatcatcgcgtcggtgatgtcggagacgaagaactcgtcgaaacagatcacccgcgcctcgtcggcgaagcgcttgccgatgatggtcaacgggttcttctcgcccttgagggtcttcagttcttcgtgcacccgcttcatgaagcggtggaagtgcgtgcgcaccttctgctcgaacggcagcgactcgaagaaagtgtccaccaggtaggtcttgccacggccgacgccgccccagaaatacaggcccttcaccggcccgccggacttcctgccgagcagcttgccgaacaggccgggcttggcgtggtcggcggcgaccaggtcatcgtagaggcgttgcagatgcttcacggcattcgcctgtgcggcatcgtggaagaaatcggggcgttggagatcggcctggtagcgctcgaggggcgtcatgatcggtagcaatgcaacgaaaacggggccgtcactttagcgacgaccccgtctcttggcaatcggccatccgtcgaggatgtaccggggctgcctactcctgcggtgccagcgcttcgcgggtgcgctcgatggcggcgtcacgggcggcggcgtcggcgaaggccgggctctgcgccaccgcctcgccatccagccacaggccaaaggcattgccctcggcccgcaggtcggcagtctcgccagccagcaggcgcttgctcaccgcaccggcggccttgccatcggcgaaggcgcgggacagcagtagctgttcgccggcggcgtccagcaggcggaagcggaagctgccgtcgtcgtcgcggaagctgaccaggcgcgcagccttggcggccttcttcttgccgctctcggcacttttcagcggctcgcgcagggagcgcaggccgactgcctcgcgcaactcggcgatgaatggggtggcgatgcggcgcgccttggcggcgccggcgaggagaatgtcctcgatatcgtcgggcttggcgatcagcgcctggtaacgctcgcgagcctcgcccagttcgttgtcgagcaactggaacaggcgctgcttggcttcgccccaggccaggccgtcgagcagttcctggcggaacgcggcgacctgttcggcgctggcgaaggccgagtaaagaaggaacaggtgcgaactgtccgggtctttcggctcgcccggcgcgcgcgagtcggtgacgatgcgtgcgatggcgtccttgagctgcctggacgggctgaacagcgggatggtgttgtcgtagctcttggacatcttgcgcccgtccaggcccggcagggtggcgacgttttcctcgatcaccgcttcgggcaggacgaagaactcgcggccgttgccgaacaggtggttgaaacgctggccgatgtcgcgggccatctccacgtgctgcacctggtcgcggccgaccgggatcttgtgcgcgttgaacatcaggatgtccgcggccatcagcaccggatagctgtagaggcccatggtcacgccggcgtccgggtcttcgccggcctcgacattgcggtccaccgcggccttgtaggcatgcgcgcggttgagcaggcccttggcactgacgcaggtgagcaaccaggtcagctcgggaatctcggggatgtccgactgccggtagaaggtcgcacgctcgacgtccaggccgccggccagccaggtcgcggcgatttccaggcgcgagcgctggatacgagcgggatcgtcgcacttgatcaaggcgtggtagtccgccaggaagtagaacgaatccacgtcgctccgacggctggcgaggatcgccgggcggatggcgccggcgtagttgcccaggtgcggagtgccggtaggagtgatgccggtcaggatacgagtagtcatgcgataccagatgtcaggcaaagaaaagaatggcgcgccggatggtagcagggccggcgcgacgacgtcagtcctgcaggcgtggcagcaacaggtccttcagatcgatcagcttgccatggaagaaatgtccgctttctgccacccgcaacagctcgtgcggtcgtgccagggactcgctccaggcatataccgcggccggcgtgaccacgtcgtcgtcctccggctgcaccacggtcagcgggcaacgcgcaggcaggctgaccgcgaagcgttccaccggcggcgcgatcatgaacagccgcgccagcccgacgccctgcgcttccaggcgccccgccagattgccggcgacgcaggagccgaaggaaaagcccatcagtgtcagcggcaaccccggatggcgtgccagcaaccagcgcgcggcggcctcggcgtcgtcgatctcgccgatcccctcgccatagctgccagcgctctggccaacgccacggaagttgaaacgcagggtcgccaggccggcatcgcgggggctgcgttgcagagtggcgaccaccttgttctgcatggtgccggcgaacagcgggtgcggatggcagaccagggcgatgccgcgggcatcgggcagatcgaggtgcagggcttccagcggcccgcaggggccatcgatggatacagggatttcgcgggtagacaaacaggaactccgtgaccccggctcgggtcgactcgtctagcagattactccaagcgacacaggcacttactcgcgtgccgtggtatacagctcggactcaagccgttaacgtaaagcaaagccgtctatagaggaaggattcgcgtggaacagtcgctcaccgcctggctgctgccggccctcgccctggtcgccggggtcgccatcggttttctgatcgcccgcctgctgcccaacgccgcgccgaacaaggtgcaacgccagatggacgacctgcaggaccgcttcgacagctatcagcgcgaagtcgtgacccatttcaacaccaccgccagcctcgtgaagaagctgacccagagctaccaggacgtgcaggagcacctctccgacggcgcccagcgcctggccctggacgaacagacccgccagcgcctgctggctgcgctgcatgccgacgaggcctatccggccgagcgccgcgagcgcctgactccgccggcctccggcgaagtgccgaaggactatgcgccgaaaagcccggacagccccggcaccctcgacgccacctacggcctgaaaggcaagtactgacgcgctgcgcgaacctgccgacgcccatgaaaaatgtccgctgtcaagcctttgatgcggacaggcagcaacatgaaaggtcttgtggggcaataggttaggccaaaaatcgaccgttgcgcgctcctactgctttttaggctaggtgccacataggcgctttgcggtggcaagtgtaggggcactccggcgagccggggcgcatcgctgttgtagcttctagcctggtgcaatccactccaaaagcgaaagcgcagcccgtaggctgcgctttcgtcgtgatgaaccaacaaaatcaggcctgtttcggttgcacggccttcgccgccgccactgctcctttcctgaatcctcgatccccagccatgaacgcctccagcatgtgcgggatgagcgtcgcagcatcgaccgcctcgccgtaggtctgcgcgtgcagcgcggcgtagcggtcgaggtcggcccgcaggctggccggacacgcgaaggtcagcttcgtggactccagtttcggcagtggcccgagccgcagcttcttgcccgtgctcatcgcatcgcccccctgttgaagaacatcggctggtacggtcgcagcaccaggtcacgcttgacgatgatccgcaccggcaggcccggccgctcggtcaaggtcggctggatgttcatgttgcgccgggtcatctcctggccgacctgattgatgctgtcctgcgcgctgtcgcgccccgcgatcacgatgcggttgccgtcctgccggttctccggcgcggccaactcggcacccacgcccagtagcgtcgtcagcgccgcgccggcgacgatgcggctccagtggtagtccacgccatcttcgaggccggaatagccggccgggtcggtgcccacaaggttgtcgatggtcagcgaagacgtgtccggcaggatgatccggttccacaccacctgcacgcgactctgcccgtagctgacctggctgttgtatttgcccatgatgcgcgagccttgcgggatcagcaggaacttgcctgtggccgagtcatagaccggctccgtcaccgtggcgatcacgtcgcccggcaagtccgacttgatgcccgtgacgagcgccccggcgatcaccgtgccagccatgacctgatacggcgatgccggcatttgcaggttgccggaattgcgggtttccgtagaaccgcctttcaggaacgcctccttctggtcttgccggttctgcgtggcggtcgggtcggcgggctgggccgctgtcgaggccggcccggccgccagcgggtcgaaggcgctgcccggcgcagccgcaggggtttgggccgtggctggcgctgcggccttgccctgctggcccgagcggaagaacaccgatgaggccgccgcggcgtcggcctccttgcgcaaggcgtcctctgggtcgtggccgggcggcgcataggtcggcgttaccggctgctgcgaggccacgatggcggggccaaggtcgcccggcagcggcggccccagctcgggcaccttctgcggcagcttcgagtagtccgaaggcaggccgtccagcccttcggacttgctcacgcgatcgacgttgtaaagctcggtctgctcgcccgcgccccgccggtgcggctgcaatgaccagatagtcgcacccagcacggcgaccgacaggccgcccatgagcatcgccagcgtgcgccggttcaggcgagtgaccgggcgcggctgggcgcgcagcgccaccgcctcgggcgcgaccttgcccgcctgcggcgcggcacggtcgggggtgtcgtccttgctcatggtcagttcctccgggtgccgtccgtgcgctcgatccgcaccacgtcgcccttgtcgccgcccaggcgcagctccgccgcgccaaagaggcgatccacgatgtagtacggcgcgcggaagcggtagttcaccagttgcccgtcgccctgcgcaccgatcacgaacagcggcggcagctcgccttgcgcgatgccggcggggaactggatatagaccttctcgccgtcatcgaaggcgcgcagcggcttccacggcggattgctgccgctgaccgcgtagcggaagcggatcttctccagcgacaagccggtatcaacaggcgcggcggtgctggccgcctgcgcctggcgctgcaaggccagcatcttgtccttcgggtactcccaggaaaccgaggccatccatgtcttttcggtcgaggtcagctccagcaggtaggtgcgccggctggtggtgatgaccagattcgtcttgaggcccgagcggatgggcttgaccatcacgttcacgcgcagcgcatcaccgctgccgctggacgtgtcgcccacgatccagcgcaccgtgtcgcccgcggcgaccgtcaccagttcctcgccgggctggagcgcgatcacggtcacgcggcccacggccgcatagacctgatacagcgcgccatcggtgaagggccacacctgaatcgcattgacgtagccctcgcgcgtgggcgcgatgcgcgcctcggcattggcacgcgagacgcgcacagtttcgtcggccggttccggcacgggcttggcggcctcggcttcgggcaacggcttcaactgcgccggcagcgccagcggctcgggcaccttgaccacttccaccggcgcgggcggctccggcagcggctgggcctgcaccggctcatcgagcgagatggccggcggcggcttgccctgtgtggcgcagcccgccaaggcaacgagcatcaacggcaaagcgtaaaagcggaaagacaggttcatggttttgctccttcggaagaatccagctcacggctccacgacaggccgttgacgtagatgcccagggggttcttgcgcaggcgctgttcggtgcgcggggtctgctgcacgatggaaatcacggcgttccagcgttcagtgcccgccgcggcgccgttgacgaagcgccgttccgtccagcgcacgttgaaagacgtgtcgctggcgcgggtcacgctggttatctgcaccgtgacggattccttgccgatacgcgcgaacgggtcgttggtgcgcgcgtagtcgttgagcaccacggcgcccttgtcggtggtgtagtcgtaggcgtcgagccagttctggcgcacgacaatggggtcgatggacagcgagcgcaccagctcgatgaagcggcccaggtggtaggccacttgtgcatcgctgggccggtacggcgtggcggcttcgccgacggcgcgcacttggcccgcgttgtccacctccaccacgtagggcgtgacgatggattgcgcggagcgccacaccaggccgccggccatcagcagcgccagcagcaggcagccgaaagccatcagccgccagttcttcgcttgcacgcgggacgaaccgatgcgctcgtcccacacttgcgcggcggattgatacggggtcgcaggctgcggcgtgtcggcatagcgcacctgcgggcgtttgaatcgcatgggtgttctccttgaagatcaggaatcggaatcgcgcaggctcggcccttggctggaactgccgccgtcgccaccgcgcagcgtgtgggcggcggtcgtcgcggcatgggtgagctgttggcgtcggtgcaggcgcttggcccaggccggttgctcctgcggtgctgacggcggcgcatcgccactcgctggggacgcggctgctggcgcatcggtgctgaacgcagcggcagcgcgatcgcggatcgagcgcgcgccttgcgccaccttctgcccggccgcctgtgcgccggtcttggcgacgttgcccacgccggcggctgcgcccttgaggccgccgccagcagaagcggaaccagcctgaaacgcggacttcgcgctgctggcggccccggcggcggcacgcgcgccgctaccggccagcttggcggcagccggggccatgcgcgcgccggcagcgacggcgccaccaacgcccgtggccgcagcgcccacggcaacggcggtgccggccgcgcccagcacggcgccggccatcgcgcccgcgccgagttgcgggccgcccgataccagcccggtcgcaatgcctggcccgaagatgcccagcgccagcagggtcagcgaggccagcatgacgacgaccgaatggtcgatggacggctcggccggttgcacctgaaactcggcgaacaagcccgagccgatgcccacgatgacggccagcaccagcaccttgatgcccgacgacaccacgttgcccagcaccttttcggcgaggaacgcggtcttgttccaaagggcgaacggcaccagcacgaagcccgcgagcgtcgtcaatttgaactcgatcagcgtgatgaaaagctggatcgccaacacgaagaagcacagcaggacgatcagccaggcgaggaacattacgacgatgggcgtgatgttcacgaacacctcgggaaagcccgccatgtcgccgatctgatcgaggatcggcgctccggcgtcgatgccgatcttggccagccttcccggatgcaggaagttctccatgctcaaggtcgagccgctggccgtcaggcccagcccggcgaaggagcggaacacgatgccggccagccagttgaagttgccgatgatgtaggcgaaggcaccgacgtagagcaccttgcggatcagcttggcgatcacgtcttcgccctggccggtggcatggctcatcgcccagaacagcccggcgatcgtcatgtcgatgacgatcagcgtggcggtcagaaacgccacctcgccatgcagcaggccaaaccccgagtcgatgtagcgcgagaacgtatcgaggaagcggtcgatgatggttacgtcattcatggcgagttctcctgcccaggcccgttgtcatcggcagcgggttcatcgaagctgggtgggatcggcggcaggtcggcgagcgtctggtactcgccggggccggccttgccggagagaaagcggcgcaggtcggctcgggccacctgcgcgcagaacgcgccgccgtgctcgcccgcgcggcattgcgcgcgtagcgcgtgcagccgggacgggtcggcggccagcgcgtccaccgaaggcggccggccgcacccggccaacagggaagcgagagcgaacaggacgggcgcgttcttcatggccgcacccgtcaggggttgtagaagttgacgggctgcggcgtgtacggcgtgccgctgcccaggaagcgccgcgtcacttcgcgcccgcgctcggtggctgcggcctgccgcgccagctccagtgcggtggctcggtcttgcgtgatctggagccgctgcgactggatcgactgcttggcctgcaaggcgagcaactggttcatggcctgcatcgcctgcaacgcgccttcggccgattggctcttgcccacgaggtcggccagcacggtttcgtcaacgcccaggttctgcgacacctgcgcctgcatctgcatggtggtctgcaagccgttgagcgtgttcttccaacgctcctgcgtgtcgcggtacatctggtcgccactgacggtggccgcgtactgctcggggtacaggcgcgcgaactcctgatccagattcgtcacgtcgtaggccaagcccttcgcctgggcgatcagccgctcggtcgtcgccaggttggtgcgcaactggccgaccacgctggacggcaggctggcgaggttgcgcgcctggttcatcagcatctgcgcttcgttctggagctgctggatctggttgttgatctgctccagcgtgcgaatcgcggtcagcgtgttctgcacgaggttcgtggggtcgatcacgacccattgcgcgtgtacggtggaaacggtgcaaagcatggccgcgacggcagcggcgatgagtcgctttttcatggctggttctcctgtgggtagtcggcggtacggaggaaatccggcgtgaggccggagaacaagggcagcaggtcagccgcccaatcgaggccgcgatggcgcagccaggcgccggcgaaaccgggggtaccggcgtccagccgcacgcggtctatgtcgagctggtcttgcggcgtggaagcgcctacgaacgcgagcgcagccgcccccaggtcgaggtcgaacaggcggtttccgaggcgggattggtagtagtagtcgcgcttcggaactgccgtggcgacgatttcgatctggcggttgttgaggccgaagccctgatagatcgtcttgatctgcggctcggtcgcctgcgggttcggcaggaagatgcggctcgcgcagctttcgacgatcgcgggcgcgatgctcgaatccttgatgtccgcgagcgactgcgtggcgaagatgacgctgacgtttttcttgcgcagcgtcttgagccattggcggatgcgcgctgcaaacactgggtcatcgagaaacaaccaggcttcatcgaggatcagcagcgtgggcgcaccgtcgaagcgttcatcgaaacgcgcaaagaggtaatgcagcacggccatgacggcggccttgctgtgcatcagctcctccatctcgaaaccctgcacgtccgccatgcccagccggtcgtggtcggcgtccagcagcttgccgtgtgcgccgcccaacacatagggcgacaaggcttggcgcagcgcgttcgattgcagcagcactgacaagccggtcatggtgcgctgctccaccggcgcaccagcgaggctgccgagtgccgaccagatagccgccttctcgtccgggccgacggccacgccttcgtgcagcaagcggccttcgatccattcggccgcccaggtgcggtagccgtcgcggtcaatgcgtgccaacggctggaaggcgatttcgccatccatgcccaggtcgtagtgctcgccgcccagcccgagaacagtggcgcgcatcgagcgccccatatcgaacgcgaagatgcgcgagccgcgatagcggcggaactgcatcgccagcgtggcaagcaagaccgacttgcccatgcccgtcgggccggcgaccagcgtgtggcccacgtcgccgatgtgcgtcaccagccggaacggcgtcgcgccatcggtgcgggtgacgatcagcggcgggccgtccaagtggtcgttcttctccggcccggcccataccgccgacaccggcatcatgtgcgccagattgagggtcgagatgatcggctgccggacattcgcataggcgttgccgggaagcgaggacagccacgcatccacggcattgagcgtttcggggatggtcacaaacccgcgcccctggatgacgcgctccaccatccgcagcttctcgtcggctgcgccggcgtcctcgtccatgacggtgacggtcgccgtcaggtagccgaaggcgacttgatcgctgcccagctcctgcaaggcggcatccgcatcggcggccttgttgctggcatcggtatcgaccagcgggctttcctgctggaagatcgtttcgcgcagcagcgcgatgacgttcttgcgcttggcgaaccactggcggcgcagacgccccaattcccgttccgcctcggatttgtcgaggcacagaaagcgcgtactccagcgatacccaaatcccaggcggttgaggtcgtccagaatccccggccaggtcgaggtcggaaagccccgcaccgacaccacgcgcaggtgccggtcgcccagcatgggcgccaggccgccgaccagcggcgaatcagtcagtagcgcgtcgatgtggaacggcacttcgggcaccgccagccgatcgcgccgcgtcgataccgtggcgtgcaggtacgtcagcgtctggctgtcgtccagccaggagatttccggcatcacgccatcgagcagatcaaagacccgatccgtctccgccacgaaggcggtcaggcgctcacgccagtccacgccctcggtgggccggttctcgtacagcattcccgctgcacgggcacgcgattcttcgggcggcaggtacaccagcgtcaggtgatagccgctctcgaagtggttgtcggattcctcgaacgctgcacggcgttcctcgtccaccagccacgaaagcggctcggaaaactcggagtgaggatagtcggcggcggcgcggcgctcggcctcgatgaacagcgcccagcccgaacccagccggcgcagcgcgttgttcaagcgcgccgacgtggcgatcagctcgccttgcgtggcgctgtcgaggtcaggaccgcgaaaccgggccgtgcgctggaaactgccgtccttgttcaagacgacacccggcgcgaccagcccggcccagggcagccagtcggcgagcagcgtgggccgctggcggtattcggcgaggttcagcatggcatcacctcacacgtccagcagcgggcgatgcttgacgtgccgcgcgaagacctgcatgaactgcggatcgacgcgcgccccccaaaccgccagcgcatggccgacgatccagagcacggcaccgggaatccagagttgcaggcccagcccgacagcggcggccagcgtgccgttggcgatcgccacggtgcgcggtgcgccgcccagcaagatcggctcggtgagcgagcgatgcaaaggcacctcgaaccctgccgcgaagctgtccgggccgctcatacgacagccccgccggagaagctgaagaacgacaggaagaagctcgaagccgcgaacgcgatggacaggccgaacacgatctggatcagtttgcggaagccgcccgacgtgtcgccgaaggccagcgcgaggcccgtggcgatgatgatgatgaccgcgacgatgcgcgccaccggcccttggatcgactccaagatcgactgcagcggcccttcccacggcatcgaggaacctgcggcctttgccgtcccggccatgaacagcattaccgcagccatcatcattccctgctgtgcagggcgagccaggcggcgcagtcgggcaaggccggacaggcgcgaaggcggatttacggaaatacggaaagcaggaacgtgcatctgcgtcatggcagttctccagggtggttgagggacggggaagaaaggtcggactgcgatggcagctcgggaaacggcgcggccagagcgtccgccagttggtagcccacgccatcgaagccgacgacgcgggcgatgctctcgatgcggcgcttgcgcccgcgcccggcgatatggatcaccacgtccacggcttcggcgatcagcgcacggggcgggttcaccgccacttcgagaatcagttgctccatgcgcagcagcgcgcccagcgcggagcctgcgtggatcgtggcgatgccgccggggtggccggtgccccacaccttgatgagatccagcgcctcggggccgcgcacctcgccgacgacgacgcgatccggccgcagacgcatggatgagcgcaccagctcggtcatggacaccacgccggaacgcgtgcgcagcggaacgtggtcgcgggccgcgcattgcagctccaccgtgtcttcgagcactagcacgcggtcgccggtagcggcgatttcagcgagcaaggcattggcgagcgtggtcttaccgctgctggtggccccggcgatcaggatgttcttgcgctcgcgcaccgcgcgaacgagaaaggccgcctgggcggcggtcatcattccgtccacgacgtaccgctccagcgggatcacgccgatggcgcgcttgcgcagcgcaaaggcaggccccggcgcggcgggcggcaagatgccctcgaagcgttcgccggtttcgggcagctcggcggatagcagcggctggccgcgatgcacctccgcgccgacgtgagccgcgactaggcggatgattcgctcgccatccgcttcgggcatttccacgcccatcggcgcgcggcccgaggacaggcgatccacccaaagggtgcgatccgggttgagcatgatttccaccacgtcggggtcttcgagcgcggtggcgatcagcggccccattgccgtgcgcagcatctggatgcgccggtcgagcgacgtggcgctcatggattggggaactgcgctcatgacgcacgctcctgcgcttctgtggctgccgccgcgtcctccatccgtaccggatcaggatgcagttcttccactacgtcacgcacgaggcttcgcccgcgcagcaggtggcgaccaagctgctccacgaactgctcgaagcgcgctttgccctgggcgcgcgctgcctcttggtgcgcctcgggaaccggcatgctgaccgtgaggtagtagcggatgaacagcgccagcgtttcgatggcgatgttctggtcgcgctccatacgctcggcctggcgcgacaggcgatccagccgcttggcgatggccgcctcgcgctggtcggcggcatcgggcgacagccaggacgccaaggcggcagcgacgatgctggatttggacacgcctttcttggcggccagttcgtcgagccgctgggcgtgctcgggctggataaagagattcaggcgataacttgaacgatgtgggctcatagttcgattccatcgttggggtcgagggatgccagccgggccgtgcgctgcatggccgtatcgagctggcgaggaaggggaagcggcaggtcgtcgtcgtcatcgagcagcccgaggtcggccgcgggtgcggcttgctcggggtcgtaggcgacggcctcagttagctcgggctggcggcgcgggccgccgtcgtcggccgttcccaggtgctccaggccatcggcggatgccgtggccggtgcggcaggcgtcggcggaatcgccaggccactccagtcgtcagcgcgtgccggaggaacatcggcatagcgccctggactggacgctgtggcgagcgcaggcggcgacagaacgcgccgcttgaagttggcgtcggcgtagtagcgcagcttcttggccctgatcggcgccacgctcgacaccatcaccacggcttcgtcgggtggtagctgcatgacttcgcccggcgtgagcagcgggcgggccgtttcctgccgcgacaccatgaggtgccccagccacggcgcgaggcgatggcccgcgtagttgcgctgcgcgcgcagctcggtcgcggtgcccagcgtctcggaaatgcgcttggccgtgcgttcgtcgttggtggcgaacgtcacgcgcacatggcagttgtcgaggatcgaatggttctgcccatacgccttgtcgatctggttgagcgactgcgcgatgaggaagctgcggatgccgtagcccgccatgaaggccaaggccgtctcgaagaagtccaggcgcccgagcgccggaaactcatcgagcatcagcagcagcttgtggcggcgctcgatgccatcgctgccgtcgagtgattcggtgagccgccgcccgatctggttgaggatcaagcggatcagcggcttcgtgcgcgaaatgtccgaaggcggcactacgaggtacagcgataccgggtgctcggcggaaatgaggtctgcaatgcgccagtcgcagcgcgacgtgacttcggccaccgtagggtctcggtacaggccgaggaacgacatggcggtggacagcacgcccgagcgctcgttgtcgctcttgttgagcacttcgcgcgccgcagaggccaccaccggatgcgggcttccaccgttcccgttcatcaggtggggcgtggtcatcatccggtgcagggtcagctcgaagggactggccggatcggagaggaagttggcgacgccgcgcagcgtcttgtcttcgcccgcatacagaacatgcaggatggcgcccaccagcagcgcgtgcgaagtcttctcccaatggttgcgcttctccagcgcgccttcgggatcgaccagaatgtccgcgatgttctgcacgtcgcgcacctcatgcgcgccgcgccgcacctccagcagcgggttgtaggccgccgacttcgcatccgtggggttgaacagcaggcaatgcgagaagcgcgagcgccagccggcggtgatctgccagttctcgcccttgatgtcatggacgacggcggacgcgggccaggaaagcagcgttggcaccaccaggccgacacccttgccgctgcgcgtcggcgcgaaggtcaggacgtgttccgggccttcgtggcgcaggtactggcggtcgtgctggccgaggaacacgccggccggctgcgtgaggcccgccttgcgaatgtcctccgcgttggcccagcgggccgagccgtaggtggtgacgaggcgtgattggcgcgagcgccagatcgacatgccgatggcgaccagcacagcgacaaggccgctgccgccggcaaacgcaccgccgatgtcgaaaacacggggcgcgtaggcgtcgaagaagaaccaccactcgaacaaccgccacgggtggtagatcggcgtacccaggaaatcaaaccagggcgagccaaggcgtagctgatagcccagagcggcggctgtccattgcgtggcgctccagacgccagcgatcacgatgccgaataccacggcgatctgaccgaacagtacgttcgtcccttgcatgaccttgcctccgatttctcctgcgctgattcctcatgggaaaagcggcacaagggcgtgccgcaggcgtcaggatcggtgtcaggtcagtgccggtcaaagaccgtttcaggcagaaagatcgagcaaaaggaaagaattcgtgaagcggcgagtcaaagaaaaacgccacaagaactggcgcattgcggcgtgttgagaaaaataaggctctgttgaatttcaagtgggttgcggggcatgaggattgatggcctggaagtcgagcttgccggcgatcaggaagatgacggttctgatggtggccaggcgcacgaagccacgggcgcggcgcttggcggcctggaacaggccgttgatggcctccaagaagccgttggtctggcgggtctgcgcccaggcgacgatgccctccaggtggcgacgcacgagcgcggccacctccttcatcggttcaaccttggagtgcatgacgcaagtgcaccagtgctggagcatggtgcgcacgacgttgatctgcttgcgctcgaggatctctcgcagctgctccttgtagacccaggcgcgggccgtgcgcaccgtggtcattctggcgatcaaggcgtccagatcggcggcggcctcgggcctgaggcggctgcgatccttcagcagcgaccagcgcagacccttgagcgacttgtcgctgcgctgctcgatgcggcgcatcttgtccaccgccgcactggcatgccagacaacgtggaacttgtcgaaggtgatgcgggcgttgggcaggaactcagtgcagcccttgatgaaggcgggtgacatgtcgatgctcaccgaggtgatctgctcggccgggcagccgtgcgcagcaaggtccgctgccagcgcttggagcgtcttggcgtcacggccctcggtgacgaacagcacccggcgtgcggcggcgtcggcagccaaagtggcgtagtcgtggcctcgggcacgcgaggtctcgtcgatggccagagccgtgacctggctgaagtcggccaggcccagggcgatctcaacgtagcgctcgcacacggccatcacccggtgggccgactcgcccacgatgcgcgccacggcggcaaacggcatctgctgcgccagcatcaggatcagcgcctcgaacagcagcgtgaaggtatccgtccggccaactcacctggacggatttgcattcctttgatctggcgcgctgctacggggctgccgcaagcttccagcgatgcggcagcaactcatcaatgcggctggccgggtgcgtgggcaggcgctccaacacgttcttgatgtaggcgtagggctcatgcccgttgatgcgcgccgagtgcagcaggctcatgatggccgccgcccgctggcctgcgcgcaggctgccggcgaacagccaattcgagcggccgatggcgatgggccggatctggttctccacccagttgttggagatcggcacatcgccgtcctgcacgaagcgcgtgagttgcgtccagcgcttgaagctgtagtcgatggccttcatcgtggccgagcccggcggcaccaactgccgctgtctgagcaaccagcgatgcaagaccgctagcacccgacgtgacttgcgctgccgtatcttccttcgctcatcgccaggcagttcctcgatctcgcgctcgatcctgaacagcacctggaagtagcgcagcgcttggtggccgaccgcgctggcgtggttggcccacaggtcgttgaatttcctgcgcgcgtgcgccatgcattgcgccgatgtcacgcccttggtcgtcgtggcggtgtagccgccaaagccgtcggtaaccagcgttccctgccaggctcgcggggtgtcgagcttgaggaactgctgaacgttctcgccgctgcggccctcggtgaactggaagaccacggccttcgtcgcgttcaagctcgtggtgcagtacgaccagatgtaggccttgtgcgtcttgccgtcgctcaggtgcttgggcttgagcatggccaccggcgtctcgtcggcgtgcagcaccgcatggcggcgcaactcgtcggccagcgcgttgaccagcggctgcaattgcgccccgcactcgccgacccactgcgccagcgtcgagcgggcgatcaggtggccggcgcgctcgaagatggcttcctggcggtacagcggcaggtgatccaggaacttggcaaccagcaggtgcgccagcaggccggcgctcgggatgcccttgtcgatgacgtgtgccggcaccggcgcctgaacaatccgctcgcagcagcggcatgcccacttgccacgcacatggcgctcgacgctgaacacgccgggctggtagtccagccgctcggccacgtcctcgccgaagcgctgcaggggctgcccgcaattgcaggtggtgtccaccggctcgtgcagcacgtcgcggcgcggcagatgcgctggcaacggggtgcgcttgggcgtcttcttctcggtcttgtccttggccttgtcgtcggcctggccctgctcgcgttcgatctcccgttcgagttcggccaggtcggcgtccagcgtctcctccagcagactcctttgctcgggtgccaggctggcagcgaagcgttcgctggtggcggcgaacttcatccgcttgagcacggccatctcgtgcgtgagcttgtcgatgaacgcctgcttgaaggcgatctcggcgtcgcgctgctggatctgcgccagcagcgactgcacggcctggcgcatctgcggctgcagggtgtccagttgctcggcgctgatcatggacgtgatcctgccgcgccgaagcgccctgcgcatcggcacatccggcaattgcaagggtggttcagatcacacggatgatccccgcatcgcccagccgctgccagggcaggcccagcaccagggcatcgaactgcggccgcgtcagctgcagcgtggcgctggcgtcggcgggccagacgaacttgccggcgttgagcctgcgagcggccagccacacgccgatgccgtcgtgcaccagcaccttcatgcggttggcgcgccgattggcgaagaggtaggcatggttcgggtgcgcagcgccgaagacgccgaccacgcgggcgagtgcggcctcggtgcccaggcgcatgtccaggggctgtacggccagccacacagcatcgaccttgatcatgcgcgtctcaagccagtacgtcgcgcagccaggcggcgctgcgcgcgtccatcggcaggctggcgctgacactggtggtgccgcggcggatctccaccgtgacgcgttcggatgccgagggggcagcgctcggctcgggcgcggcaggtgttcgatcaccgaagtcggccagcgtcaccggcacgaatgcgggtgggctcatggcggcctgggtgcgcgtcgccgcggatgcatcgtcggccatctccgactcgcgcacccagcgtcgcagcatgttcgcgttcaggccgttggcaagcgccactgcggcgaccgagccatggccttggcgggccatcgcgatgacatgcgacttgaactcatcgcagtgccgccgccagctccgcttgggtggccgcgccacaccgggatcgggttgggaagtgtccatgtgtccacgcatttgttcgtggacacaagcatccagggccggctgcggcaattcaaggtgggttggccggacggttacgcgtgaagcccgacaggcgcccggcaaagtccggctcgaccaggcgcaccgagccgttgggcagcttgacacgaggcgtgcgcacctgcaggtggcattcgtgctggaagaagttcaggtgccgataggtcttggtcacggtgtcgtgcaccgggtgcgcaccttcgtgtccggagatcgtgaagcgcgtgcccggcttgaagtcgatcagcaccgtcagcaccttggccgcttcgtcgaactccaccgtgtccaccacccagggctgggcaatccccagcgccacctcaaacagcttggccgtcatcactgccccccgcttctatgcccaccaaggcccaagattacccactcggaattcaagagaggcaaaaataatgaggtgatgcggctaaggaaggtctgaacaagtgcatgtttcttgcatgaggcacagggtcacgcagcggagccacatcgatgagccagatcagtttctcggacgcggagcaagcgggcaagaggaagaagacgcggcgcgaagtcttcctcggcgagatggaagtggtggtgccgtggaaggcgctgctcaaggtgatcgagccgcactacccggtggcgggtcggggccgcaggccgtatccgctggaggcgatgctgcgagtgcacctgatgcagaactggttcgcgctgagcgatccggcgatggaagaggcgctgtacgagatcgcctcgctgcgcacgtttgccgagctggatctggcggcgatccctgacgagacgacgatcctaaacttccgccacctgctggaggccaacgacctggccgaggacatcctcaagacggtcaacgcgcacctggcccgcaaaggcctgctgctcaagcgcggcagcatcgtggacgccacgatcatcgccgcgccgagttcgaccaagaacgccgagggtgggcgcgaccccgagatgcaccagacccgcaagggcaagcagtggcacttcggcatgaaggcgcacatcgcggtggatgccgacagtggtctggttcacacggtcaccaccacggcggccaacgagtccgacgtcgaacagatcggcgatctgctgcatggcaaggaacaagacgtgtgggccgactcgggctaccggggcgcgcagcgccgagtgacccgagatgatcggcactggcacatcgccggccggcccagcgacatggccaagctgcccgaggggcgtgcgaagcagaggctcaggaagcaggagtaccgcaaggccagcgtgcgcgcaaaggtcgagcacccgtttcgggtcatcaagtggcagttcgggctggtgaaggtcaggttccgggggttggcgaagaacacggcccacgtggtcaccctcttcgcgctgtcgaacctgtggatggcgcgcaagaagttgatggcgatggtgggagtcgtccgcctgcagatggcatgacgcacgaacaacgcggcgcgatgcgcccaaaatcctcgaagcgccggcactcttccgggccgaaccagttcgcacggctcaatgccatcgcgttcttgccctgttcagaccttccctaaccgccaacagtcagaacttcggcgattctttcggtggcgcgtacggggtttcgccgtcgccatagaaccgcttgcgcgtggcttcggcgacccggttgcacagaaggtcacccaacttggggcggccggctttgcattgccgccgcagctccttgagccgttcggggttggctgccagttcttccaccgttggaatgctgacctctgagacggcggccttttgaggcgtctcggactggccgcaggctgtcagggctgccacgaacaggaaggggatgatcttcttcacggcctcggttcctccggtggatcgggatggaggtccggtatgggcccgggcgactccggtgactcgacggcctgcacgcgctcaatgaaccgcgccagcacatcggacgagttgccttcgagacgcagcaggtaagttgtcaaaggcggcacgcgcgatgccaacggccgggccacgacgccaggctcgcgattggcagcaatgcgtgcggcgccgaccagtcccagcgcgaagccggctgataccagggccatcatcaggtcagtggatgccacccgctctgcaatcagtggctccatatccgcgcggcgtagcacccgctcaacgtgcttggcatggccttcacatgcctgtggatcgcacaagaccaacggatagcgcaaaagttcgtctaaaggaatgcgcttatgtgccagtagggggtgccgagcgggcactgccactatcagcgcatcgctccaagcgggcacggaaacgatgccattgccaacttcgttggactgggcgaaccctacgtcatagagatcgtcatgtagccctttgatctgctgcgacagcggcacctcgaagaggcgaatctcgacctcaggttcttcttggcgacaaagtacaagcaaagcggataggcgcgacagcgtgataccgtcggacagagccacgcgcagttgcctgtgaaagccattggctgccgctttcacgctgtcacgcgcttgttccaaggcagcaaacacgcgacgcacgtgctcaaggaacagattcccggctcgggttagccgcgtgctgcgtgtggtgcgagcaaacaaaatcacgcctagttcttcttccagttccttgatggcgcgcgatagcggcgactgctcgatatacaatcgctcggcggcgcgggcgaagtggagttcttcggccacagccagaaagcagcgcaaatgacgaagttccatatcccgttcctcactaggtgactggcaaagccttgtggtgatgcatggccgagtgacctgccccaacgcgcgcattgccttcgataagttctacttcgttgcccacgccacaagcgatgttgactagacgcctcaccttggacagaagatcgaaccggatctcgagggctcatgctgggcgttgatcagagaccgcatccgccagcccgccttcctacgggccgatctgagcagcctcatcacccaagttgcgaccaagcgcacggcgcgcgagcctttaccgaaagcggctgcacgagttccccgttcggaagcagaccatcgttgcgtgcgagatgcgcacccagtggtacacgaccttcatgcgctccggggttgagccgaggaggggcgcttgtctgatccgcaaacatttcgaggacatcgttgcctagacgcaagtccgtcagaccaacggcttcttccatgcggctaagcgcaaggcgcgcgtctacccgcttcgccaccaggtgaaccgtattcttcctgagcacaggcaagcacaacttcgttcagataggcccgcaactgcttaacccacgcaaagtcggaaagagtctgtagcgaaagagcccttgattcacctccagacttgcttgggtaaactgaaaatcctttcaaattggtatgaatttctcgccgtcacccacgcagggcgttgacgaaaatcctcggcagcttggtccagctgggtttgaactggaagtcggtcaagagacggccaatcacatcttgccgccggttcgtgatgaaccaaggtggccgaggaaggagcgttggatgcagtgagagcagactgcgagggaatggtcgccatggggcggatatgacggtacgctccgttccttcaagcatgaacgagttatgtaccgtcccaataccagattgcggatcgcgcgacgaccctccgggaaatcctccccaggggcagggtgcaagcagaaatcccaatccggtccaagcattcacggcgatggtgccgtagcgcagcttttgaagcagttcttcgaagcgttgacgaccgatctctcgcacagtcttggggtgaatcagaatatttgcccccagggtgccgtacaaacggtcattagcgtacgcaatggctgattcaaggtacgaccccgcatctttatattcgaaggactttattgctaacgccgtgccgaagacttcgtgctgcgccagccatggctcatcgccccgatccatgttcgcaagaatgcacgcaggcgcaagcagaccacggtcgatcgcatccgaacctccggcgtgggcggcaaactcttcgatgcgctgctcgttgccagggtagtaggcctcccgctgcccgaagcgcgacatgacattggacacagcagccaaaagtttgtccgtgtgtcgccagccacgaggcacgatcaaggtttggcacgccacgcagttaaagccggagttgtgcaacttgtgcgttgctatctgttcggcctgaaagcggatgtccgcgttcgaccacggcccgggcaccacaatggtggggcagactgcgcccagttcggacgtgatctttcgatggttcttcggtgtattcgcggccttgttgcgtgcgccttcttctccgatgccccagacgatggcatcgtgggtggcctttgcgccggtgatgtggatttcctctaccagcggatgctcgcacaggtaggcacccacggcgccatcgccgcgaatgatgcgtagcgcgtcgcattcgatcaggggccgcagggctgccttgagatagtcggtcaggtagtcgttgaccggattcatcttcagcagaaccacctggttttcgataaacagcttctgaaatgcatcgagaggcgagatggccgcgatgttgcctgcccccaagactagggccaccttaccgcgccgctgttcgggagggatgtcataggcgaccgccgcatgttgagcgagactggcctcggagattcccttttgcatccagacttcagctgagaccccggataggagcaaccgatcccagatcgaatggggcagaactctaaccgccaattgcccattcttgaggtggcccaagggcaagtgctcaagatattcctttctatcaatggcaccgagtgtctgcatcaacccgttgcaggcgcccatgagggcgtaggggccggagagccattcctccccggccagcggcgatgcatgcggaatgcgcttcttccgggcagctgtctccgcccacccctgcgcaacctgcatcagcgctggcttgatgcggccgagaatagcaatccgatcggcgaccgaggtttttgcccagtggtgcttggccccatccagtgcctgcaagtcctgatccaacagggcctgaatatcgaaatttgggagagcggcccccatcactgcgtgctctccgtggtattgccggtcaggaggctgccgtaggcttcgcggagcctgttcttgagcaccttccccgtgccactgagtggcagcacatcaacgaagacggctttgtcggggatctgccagtccggcaggcgtcctttgaagcaggccagaaggtccgcttcggacacattcgcgccttcctttttcacggcgaccagaaccggtcgttcgtcccacttcgggtggggcacgccgatggccgccgcattggcgatggcaggatgtccgatagcgatgttctcgatctcgaccgatgaaatccactctccaccagacttgatgatgtccttggcgcggtcgcggatgaccatatagccgttgacatcaagcgttgctatatcaccggtgtcgaaccagccatcactggtcagcgcactggattcggcgccgaagtagctgctgacgatccagtgccccctgatctgtagtttgcccggggatttgccgtcgttcggcaagactgcgccgccgtcatcgaccacgcgcagctgaacgccgtagggtggtcgtccctgccccagtcgcacttcgctctgccgctgaggatcaagatggatgtggcgagccagtggttgattcagggtgcccagcgggctcgtttcggtcatgccccaggcatggatcagttcgacaccgaactcgtcccggaacgcggcgaacatcgacggcggcagtgccgcgccgccaacgatggtgcgtttcaagcttttgggcttggtgccgcgcgccctcaacgccgccagcagtcccatccagatcgtgggaacgccaagtgccagaccgacttcctcgtcgtcgatcagggtggcgagacttgggccgtcaaggttcgggccaggcaataccagtttcgctccctgcgccgccgcaatgtagggcactccccaggcgttgacgtgaaacatgggaacaaccggcatgacagcatcgcgggccgaaacgccaatgccgtccgggctgttgcccgccaacgcatgcagcaccgtggagcggtggctgtaaagcacacccttcggatgtcccgtagtgccggaggtgtaacacaacgaagaaggtagatcctcgtcaatgctcggccacgggtagtcggcgtcgcccgaggcgaccacctcgtcgtagaactgcaagccatccaacatgcccgatgcctcctcatcgcgtggccccatgagaatgacatgtttgacggtgctcaatgccgaccgaagcttggccacaatgggcagaaaggtccggtcgatgaacagcacctgatcatcggcgtggttgacgatgtagatcagggtttcggcggacaggcgcggattgactgtgtggcacaccatgcccgcgccggaaacgccatagtaaatttccaaatgtcgccgattgttccatgcaatggtcgcgcaacgctcgcccgattgcacgcccagcttggccagcgctgacgacaggcgtcgcgcattgatctcgacttgaccccaggtcgtgtgttcgatcccgcccgtggtgttgacggaaacgactggcgtatcggcatggtaacgcgcagcatgggcgatgagactggagacgagcaaaggctcgcgcatcatttttccgagcatttttctactttctttcagaattggtatttgaggccgacgtcgacaaccagaggattgaggcgaatggagactgaagtagacggtccaccaagcgcaagcatcgtgccagcggcctttaagaggtttttctattggtatgcaagaagtaatgcaccagatttacctgaggagtgcgctctcgtatgcttggcgttcgttctttcgggaaatctgggctgggtgtccatgtgctcgtttaatgaggtccgcagccctctcggcgatcatgatcgttggcgcgttggtgttgccgctgatcaaagtcggcatgatggaggcatcgacgacacgcaaaccttgcagaccatgtaccttcagctccgcatcgaccacggccattgggtccacacccatcttgcaggtgccgaccgggtggtaaatggtgtcggatcgatctcgaatgagctggccccattgcgcatcactcatgccatcggtaacgccgaacaattcgcgcccacggtacttggccaagggggatgccagcattatctctcgtgtggccttggccccttggaccaggagcttcacgtcacgctcgtcagacaggaagcgcggatcaattcctgggtcgtccagcgggttgggtgattgcaagaacacctcgccacgcgagtaagggcgcagattgcagacgtggcacgagaaaccatacccaacatgcagtttgcgcgcgtggtcgtccacgatcgagatcacgaagtgcagttgcaaatccggccgatccacgtcaggggcgctcttgaagaatgcgccgccctcggcaaatggggtggcaagcatgccgctgccatccttgcgccaactggaaatgtggcccagcatgtccactgaccctttgagtccgatgccgaagttgtcagtgtcctgggaggtgtaggccagaatgaaatccaggtgatcctgcaagttctggccaacaccgggcaactcatgcaccatgcggatgccgtgatgggtgatgtcttccgggcgcccgacgccggacagctgaagaatctgcggtgaaccaaaggcgccggcagccagaatgacctcccgcttggccctgacctcgtgttcggcaccgccggcatggtaggccacgcccacggcgcgcttgccctcgaagatgatccggctggcgcgggtattcgtcttgatcgtgagattcggccgttgcccccgcagaggatgcaagtatgcggctgcagcggagcaacgctcgcctcggcgggcagcatcgtggaattgcgtgacctgatacaagccaacgccttcgttgtctccatcattgaaatcggcacgaaacggaatgccgcgctgcttggctgcctcaatgaacgcaagcgtgatcggcctggggctacgctgctcggacacatgcaaaggtccattcccgccatggagcttgctcgctccacgctcgttgttctctgccttcaggaaatacggcagcaccgagttccagtcccacccttgacaccccaggtcggcccagtgatcgtagtcctgacgctgtccacggacatagagcatggcgttgatggccgaagatccgccaagggcgcggccccgcggttgatagccccgccgaccattgaggttcggctgaggtgcggtgttgaatgcccagttattgatcttgcccttgcctggcatcatgaccaccgttccagctggcatgcggacgaccaatgagtcgccttgtccgcccgcctcaagcaggcaaacactgatgcgggagtcttcgctcagccgcgaggccaaggtggcgccggcagagccgccgcctaagatgatgtaatcgaaattcataagagcccacgaaggagccgatggctccgaattgaaagaagggagtggaaggagcagcgagcgtgttcagccagccgccaattccttgttccattggcgtgggtcgtagaaacgcaatgccttcaggccacttttctggtttgcacgcagcgccaactccctctcctctggcgtggcgtagtgccgatcccactccatgagcttggggatcatcattcgctgccaaagcggcggaatcatcgtcagcagtatcgtggtaaggtagccagcggccattgtcggggcctccggcaagggcatcaagttctggtaaggcacctcgccttgggcatggtggtgcgaatgccgacttagattgaacatggcccaggaactcattctggcattggtattccatgagtgccgtagttgtacagcctgatcaggagcgcgcaccatgccgtaatgctccatgtagttcacgatttcgagcagggattttccccacagcgcgctgccggtaaatccaagcacgccgatccatcccgccatccagtaggcgatcgccacgagcaccgcactcatgagcaatccgcggatataggcgttgcgcaaggagatcaccggaagatgcttgcgcttgaggcgttcggcttcgatgcgccaggcgctggcgttgccgcgaatggtggagattacgatgtgctgatacacattgcgtcctcgcggggccgtggccggatcatgctcggtcgacacatagcggtgatgcccgtagacatgctcgatggcgaatcccacgtcgaagctgaaagacagcagccaacggccaatgaacatcgagaccggctcccaagtgcgatgcgtcaattcgtgcgccgtgatcgttcccagcacgccaatcacgaagccagtcaatatgcctccagtgaggtggtgccaaaagcccgtcgcctcccgggcggccagaacgtcatagtgggtgagatgggctacccatgcgccgaatcccaacggatcaccggaagaaagcgtccagatgtaggcaaatacgatcagcgccaccaggggcaggatgaaccacagttgcaccgtgagaatccacggtgatttgtattttggcgttcgggtatcgttgcccaacagcgcatcaccgccaacgtagaaggcgagaaagccgagcagccccaaactggtgtaggcgccgcccgccagaatggagaccaaagcaccgatccccgccccatgcaaaaggaagaacttcagatagtccaagatattggctggcacacgctcaacggtaggcaagccgacagcgccgtagaagccggtgtggagcttgggcgcctgatcgacgaagcggtccgcgtgcaaattcgtgtctgcaataccacgctggcgcaggacggcgatggccgagtcgatcatggccggcgggccgcacagataagccgacgtggcgcccccaagcagttctggaatgtgctccgtcaccaagccagtgcgcccgtcccagggcgatgaagggtcggcctcggacagaaccggcacgaaccggaagttcggccaatccttttcgtaggctgccatctcgtcgagcgcgtacagatccttctggctccgagcgccaaacagcaccgtcaccggccgcgtgtcgcccgagcgcttcatgtcttgaagcatcgcgaggatgggcgccaagccgctgccaccagccaccataaggactggcccccggcccgggcgcatgtaaaagtgaccgccggggccgcgcacggcgaccgattcgcccacatgcgcctggtccacgagatgcccggacacccgcccccccggcacacggcgcaccgtgaaactcacttggcgatcattgccaggtgcggccgagaatgaatagctgcgaggagcatcccacatcgaagtcagcgtgacctctgcaaactggccggcacgatagcgaatcggcgtgtccagttgaatgtcgattctcgcgatgtcgtgagtcagcatttgcttgccgacgatcacgcccttgaccggagggccatcgatcgcaccctcccgatccagctcgatcttcacatcgctgcgcaggcggctctggcaggccaatatgaacccgtcggagatttccctctccgtcagcaggtacgccgtctcggtcagttcgtcaaccttgccgctcttgagcttgcacttgcaagtcccgcagccgccgacacgacagatggagggaatgttgatgttctggcgttgcgctgcctccagcaaagtttcatcgggctcgacggtgatggtctgcccgtttatctccgcttggtgcaagcttcttccgtgaagaaaattcatcgcaattgtctcctaatgaatgtttttttccttttttattagacttcgccaccactttctgtcgcaagcgcataaactgacaaacatggtgcatttcttgccaagcacctgccgctacgtgtaggatcgttttgatagtcatcagaggaagaaggctgaggagcgtgtcggactcctcagggcggccaccggccggcacaagaacatggagcgagacaaccgtgaacccaaaaactgttcgagtcacctacctgcggcaaattgcagatcaagcggctgaactgggcgtggataccgtggcgtggctggccatttccgacctcaagcaagatgatcttgccgatgcgtcggcggtagttgccgtcgaaaagtttggagagctgatcacccgcgccgtcagtctgtcgcgtgagacgggcttcggggtattggctgggcgtcgtttgcttacagcaacccatggtgtcctcggcatggcggctgcggcaagccgcagcatccgtgaagccatgcaaatcgtcgagcgttttgtctgcatccgaacggaggctatcagtattcatacccgcgaggtaaatggaagtctggaggtctggtttgaaccggcgatcggtctgggttctgcaagcaacacggtgacggaaatcgcgatggttgcagtcaaaaatatcgccgacgacatatttctgagtcgcagtgcctgcaatatggcttactttcaatttcctgagccgcctcatgcggcactggcacgcggcgtttacggctgcgcagttcgatacaatcagaaatggtcaggtttatcttttgatatttctgctgccgaagaagtcacccagaaatacgatccattggttctaacagaggcagtacgcttctgcgtcgaagagttaaatgaaactggagataacaggagcgcaggctcgaaattggagaaaattgttctagaacggcttccgccaattcctcatctcaccgtatgtgcacggctgctgagcacgacgcctcggacacttcatcggcgcttgatcgaagaaggaaccacttaccgtgaaatagtggaatcaattaggcatcgcatggcgttaaaactgctcagaaaagggtcttccatcaaagaagtgacctatttcttgggctatgcggacatcgccagtttcaggcgcgcattccggcgctgggaaggtatggcgccgtcggattggtcggcaagagtgcaagagccggcgggtgaatccaggtaattgatggctcttggaatgtgaaggatatgcttgatgacacaccagaaaagttcgtgcgactgaactatattcggccaaatttttgccgaatattttgatcaagtgtagagccagcagatgccccgtgcgcgtgcgatgctttcttgatcgaaacattgcaggccttcggtatcgaatggaaaaaaacgttttgtccatcgtctcaaacgatagcaggcccgcgtttacgcccgatctcccaacataccccgctaccgcgcactatggccgcaagcggctgccccaggcgctgttcaattaccggtttccagggcaccaggctgaatcctatgccatcgtccagcatcgcgtagcgcccactggcgagcatgacgctgcggcggtagatgccggccacgcgctgcccgtcggccaccgggcgatgctccaggccggtttcgccggcaatgtccttcgcggcctgcgccagttcccggttgcgcagcatgcccagcaggttgcgcgccaggatcacacgctgcccgcgccgctcggccagcccctgttcggccaggaagtcggcgcgctgctgcatcgcctgcttggcctccgcgccaaagcccaggtcgcccaggcccgagccgccgccgatcaactgctggtcgagccaggtggccccgatcacgcgtgcctgccgctcgatgggcaggtgcgatttcagctccacggccacgccgcccaggcgttgcgcgtcgtagcgctggccctgctcgggcaggtcgcccggcaccttccatagcccttccgccacacgctccacgatgcccgcccggcgcagagcttccaggcggcggacatgggccgccacaacttcctgcgggtcgcggcccggtacgacctggccctgcgcgatggcgaggtggtggtcggtgcggtacaagccatcgctcgccagcgcggcgatgttcctgtcggccgcgcgcacatcggccgatcccttcacctccactacggccccggtcggatagttcgccagctcgtcgcgggcgttgagcgcgacgtagtgggccttgccgtccacgccgtctatgaccagatagccccggtcgcgcaactcgtcggccagccccttcgcggccacgcggccgaggatggttcggccgtcgtcccccggctcgaacaccgccagctcgcgcggctcgccgcgcatggcccgctgcatcgtgcggatgatgtcgccgcgctcgcccagggcgcacagggtcttctctgcatcggcatggacggcccaggtgcccggccgcgtctcgtcggccaggcccaggcgctgcaagcgttgcaggcggccgatcagcagcaggcgccggcgctgcaagcggggttcgttgagccgttcggtatgcaccaggccatcgccgccggcctcgcccatttctcgtttgagggtgcgatccaggctcgtccaccgctcttgctccacctcgcgctgcaaggtctgctggatctccagctcggtgcgcggccccagccattcggtcgccagctcggcggcgcggtggcggaagccaacggcgatgtagtcgcccgcgatgatgaggtctttgcccgtgtcgtcgcgcccgcgcacgacgatgtgcgtgtgcgggttgtcggtgttccagtggttcacggccacccaatcgaggcccgtgcccaggtcggcctccatacgctgcatcaggtgccgcgtgtaggtgcgcaggtcttccagctccgcgccatcctcgggcgagaggatgaagcggaaatggtgccggtcgtcggcgcagcgttccttgaaggcgtcgaggtcggccatgtctgtctgcggcctataggcttggcccggctcgccgtcgcgacccacgccatcgcgctcgatgtagcgcaggtgcttggcaagcgactgcgggctggcccgctggtgattcaccagcagcgtcttgatggtcacgcgccgggacatcggcgtcagcttcgcgcccgcaaagcgcgccgccgtatggccgcgccccaggcgcgatccgggccgttggccggtgccgcccgccgagccaggacggcgcaccgtggacttgccgctgctggccttgcccgtctgcttgagcaccttggaaacgaagctctgcccctggcccttgccccggttcttcggggcctttggagggttcgggtgcacgcggaaatcgtcatcgcggcggtcgctcatggctgtgctccctgcaagctctggcgtgtcctgtcgtgcgaagcacgcggacatgcctgcattggcgcgggcctcgcgccatacgcggcacggcggcgaagccgctccgtgccgcgccacccccacgtgcagactggctttcgacgcggcccggtgccgcgtccttttgtcttgccttccgcatttgcctccccctgtcccccaggttctcgatcccggcaactgcggcccggtggcaaggctgcaccagcagccagcgcaccggcgaacacggcaatggccgcaggccagccgtgttcgaggcaagacgcctgcacgtgggacggctgcgccggaggcagcgcgaagtgcagcgcggatgcgctcgcactgcacgcgcgacgacatgacaacggccagcagaacgacacgcccgatagcacgatgatgcgcagcgaatcggtggccatcatgggcgcgactccagccagacggggcgcgcaacgccgatcacggaagctgcgctgaccggcccgaaataccggctatcgaacgacgccggattggtcacgctgaggaggaacagctcgccatgccgcaagcggtggcattgctgccgggatggcagcggccggccccagcgatcggcagacagcacggcggctgaaggcacgccgtcgatgcggactttgccgtcagcgatgcacacctcttgcggcgccaccgcgcccacgcgcttgagcagaggaatgcgcgtcggcaggtagccgcgctgcgcagcgagcgcggcagcctcggcaggcagcggcaccagcacgatgctgcctaccgacaacggacgtggtggcgagctggtgcgatggtcgagcggatcgatgcgataccagccgacctccacgctgtcggacgggttgtaggtcaggcgtggcagcggatgcacgaaggacgcccaggccagcgcagcgaggccgcaggcggacaggcccgccagcacgaggcgagcgcgcacgcgcaagcgagggtgcggcgcggtgccggaagtggaaactgcggtcatggcagcgccctcccggccagccaggcggcgtgccgctcggcggtgtattcgtgcagcggcaagtgcgctgcgagccggttggcgagcgtgcgccagtacgcgggcgagacgccgacaggcgtgatgcccagcgcctcgatggcgtcgatgcgcgccagcacggcacgcaccgattgctcaccctcggcgtgcagcaagaggcgcgcgccgggttgcacgccggagatgcgctgcgcgccatccatcggcatgcacgcctgcatcaccatgagctgccagcggatcgtgccgtagtcgttggcctgccagcggatgcggcagagaaccgcattcggcgtgaacaccgcgcagcggcgccagcggtcgaaccggatgatgcgggcaggatcaccgaagcgcaggtagaggtcgaagcgttggtcgatgtatgcgagcgcaacgcgcgtcagcggtacgccgtcggccacgccgacaggcgggatggacggcggtgccgaagccgtcgaggcgggtgtgttcatgaggacttctccgggaattcccgctccagcagcgcgcgcaacagatcggccaccgtcacgccttgcgtgaaggccgataccttgatgcgcgcccgcatggcgggcgtgatgtcgagggtcaggcgggccgtgtagaggtcgcctttctggaggtcatcggcactgccctggcgaatccacgcctcggcgtgcggattcgcgggcgggcgagcgccgatgccgatgcgcttgcccgtgcgcttgctggcaggagtgctcatgacggccaccgcagcagttcatcgaccagcgcggtgatttcgcgcgcggcggcgctgtctggcgccgtctcgcgtgcaagccggccggcggccacgctgtcggcaaacacgatgcgctgatgcacttccgcgcgcagcgcaggaagcggctgctcggccagcgcgccgcgggcctcgcgtccgatcacggtggtgctcacgcgccggttgatgacgaaggccgcgcgcagcgcaggccggaacacctgcgcctcacggatcagcgccaccatctcggcgctggcccacaggtcgtaggggctgggctgcaccgggatcagcacccgctcggccgccagcagcgcggagcgcgccaaggcagcgatcctgggtggcccgtcgatgacgacgtgatcggcccgcctggcgagttctggcgcttcctggtgcagcgtttcgcgtgcgaggcccacggcgctaaatagccttggcaaaccttgctggctgcggcgctgtgtccagtccagcgcggagccctgtggatcggcatccagcaggatgaccgactgcccgcgcatcgccagctcgccggcgatgtgggtggcgagcgtggtcttgcccacgccgcctttctggttgagcagcgcgacgatcatgaccggaccctccgtgtcggaaagcccgcctgttgccgctgcgcttcgcgtcctgtggcggttgtccaccgaggcgcggcgctgctactaccagttagagtatttaagttagggaagttaggagaggccgaaacccgcgccagtattagctttgcggccggttttgttgcctgatagcacgaggattcgttgcctgatagcacgatacctctgttgcctgatagcacgagtccgtccacaggctgcgcagcagttatccccgtgccgtggacggcacgggccggaacgtcagcagcggcgaggcaatgcccgagacgtactcgatgcccaactggtagccaggcaaggcttgccgcaccaccagtgcgcgcaggtcggcggcgaagtcgtagtaccgcgccacgctgcccgacttgcggtacaggtgctggaagtcgaactgccagccgccaggctgtcgcccgccgtgcttgcgcaccaggcggtacagccatcgctcgatcccgcccgtcagccggaaatacgccgggtcgatggtcaacacgagggcagcatcgagcacgcccgcatagaaccagtccggcaggatcagttccagccccaagggggtgcccttggcatcggccagttccttccactcgttgatccatgagaagcgatgcaggcgccgcccggtcgtctcgcggatcgacgtggccacggtcgtggactgcagccgatccaaggccgccttgaggcgctggtagtcgcgcagcgacgtaccgcgcccgatgaagcgcaggatctcgtagggcgtggcctgcatcagccgcgacgggcgcaagcccgcatcgcgggcttccacaatctggcttgcagcccagatcaggatgtccgcatcccaaatcgtggcgatgccatgctcctgcgtgccctccacgcggatcgtgatgccgctggcgcggaagtcgatcggcgccgtgcgccgcgacttcgccagcgagaagaacggaaaggccatcaagtcctggctgtcgcgcggcgccatgtcgcccggcaaggcgcggaacagatcgagctgttcgcgctcttgcatcggtcgctgccgcatgggcagcgcggggctggacatggcgaaggccacccgcgcgccagcgatcagcgcgcacggctgtccgccgaatgctgctcggcgtactcgggctcggacgtgctctcgaagctgcgctcggcggcccaggcatcgaggtcgaccacggcgtacatcacgcggcggccgaacttgcggaacttgggaccgcctcccagcacgcgctgcttttccagcgtgcgcggcgacaggcgcaggtactcggcggcttcgtcgttggtgagatagcgttggggctgcgcggcagcggtcgagacagtagcggcaggccgcaagggagcaggacgcatggtgagaacctccatcggttgcagggctccggccacacagcgcaaccggatgaaggcagtctcagaaaacgaagccctcctgctcagggtcgttttgcgctctcttcaaaacgacccttctcaagcggcggcagttgtgctaggcggcgatagccgccgcgcatcaacgcatcgccgcgccgcaccaggcggcgcaccttggagcgcaggccgccgtcgctgtaccagccggctgcggcgtccgcaccgaacaagccctcggcgacgtcgcgcaaggacgcgcccgccagggtggcgtcgagcgcctgcagggtgtgtagctccagcagcgccgcaggcggtggcctgggccgagccattgacgcaggcgtaccaggcataggggccgcaggggcggcgtgacggccacgataggcatgggccacggccatgccgtcctccaggccaggcgccagcgcatagcgctggcaaaggctggggctgcgcgcgatcagcgccagacccttgccgtcgtgcagcaactgcttgtggccggggatgcgccagaacgcgaaggcggtggcatccggaggcggatcggcatcggggtgaagctgcaccacggccccatggccgggaagccaggccggatgcgcgtcacgcgcatccacgtccgggtcttccagcagacgcaagccccagcgatgcgcggcatcggggcagcgcgcacggcgcagccagtcgatccggtagtcgggatggcggcgcaggtactcccaggccagtgcgagcgtgtccagacacaggacgtagaggtaggcggcggtcggataccagtgcgcgaggtggtgcggttcggccatgacgcaagctcccgtagagcaggacggccgtcactggtttcacacgccaacgtcaccgcatcgaactagcatccaatcgtgaataagctggtagattagtaacttgcgtgtcaagacgaaaagcatccgatggattgcgcggatcgtctgaatgcgacggtggcgcgcgaggaaatgcggcctcctgcgctatccaccgtgcccgatggcacggctggcgtcatgaccgtttgcgtcagggtggcactggtttggtgcaacagtgcggattaagacctgacgggtctggagcaagaccgaaatagcctcaatgcgcccggcttggccgtggcgcgaacggctcaatcgaggacggaaccgttctcctgggccagccgcaggtactccgacaacgggcgcaccgcccggaaataccgatctcgcatcacgggctgtttgctcggcccgacgatggatgcgaggtcggacagcttgatctcgcccagctcaggcatgctgatccccaagtcgatcaggccatgggccgtatcgccgtcagcggggtcaagcgacaccagcagccaagtggcgtgtgcgtccggcgtgaacaaccgcaccacgggcagcgggtcgatggcccggccagcggcccggacccggccgtgttccagcagttgcttgcgctcgtcctcggtcatgagttggttcatgggcgtcacctcattcgcacaaaaccgccgaagcgtgaaagcgcaaaaccgcatcggcgggtttgtggaaaggcacggatgcggttttgtgcttctgtgagaagctgcagatacggatttccgtaaaagcacgaaagcggcaggcgggcatagttgaacactatagattgtagccctatagggctcaatcggatgtcatcttggattttgcggagatccagggttggcagcgaaacatacattgtcggaggcactaaagaccatcaggaaagcacgtggtttgagccaggaagcgttctcggacgtgtccagccgcacctacatgagcacgctggaacgcgacctcaaaagccccaccttgaacaagctggccgagctgtgcgaggtcatggaggtgcacccgctcacgctgctgacgctggcctatgccggcgacgacctgcagcaggtcgatcagctgctggcgcaggtgcgccaggagttggagactgtggcgaagaagagtgacacgccatagcgtgcgaccgcgctggcgtggccgatccggtgcagccggttcggggacttcaggggcgccaagcatcgcgcggcggggagaggccgcagggttttcccccggaggcaagcgaagcgcgcagctgcgatagggattgaagccgaatggccatgacggcgaagtcggcatggggcgcagcccgcaaagcccggtcggcgcagtgcgccgaatcgccctgcattcgccctggcaacacgaagtcatggtgatgctgcccgaccaccaccatcacgaagctgggagagccaagccttccagtctgctgatccaagcagtacagcgccccgccgcagtgggcggggcgctggcggccgtcaggccgcctggggcttgctgcgcgaccagatcaggtcgtgcgtgccgttctctccttcgatcaggcgggcatagaccgtggccgggaacgaaggatcgtcgagggtcacggagatgtactcccgcccggcctcgctggtcttcttccacgccgcgccgatgtcgtggctggcggcctgcaggcggaagtccggggccttctcgttgtcccccttgtcgttgggcaccagcttgaccttgacgttgagcgtcagggtgcgaagcgtgccggtgaagccgtctttgtctgcggtgaaggtgccgatgttggccatgatgaaactccttttggtggaacaaggttcgcgcccatcgcgtccttgttgtgatccggccggcgggggacgggcgggctgcaccgcttgcggtcgcaacgcagtggagagccgggaggcgaaaagaatttgtcccgcgaggaatgcgccgaacgcagtgacaaagcaggggaaattgttttcgccggacggttgcagccatgaagcccgaggcgcagccgcgccaccgctaggattcacaacaacacaaggacgccttgggccgaaccgcatcgaaaggaggcagggccggctcggcatccccgcacgaaggcagcaccggctcgcccactgacgcgggccaggtcaaccatccgacgacaagcgagaacgccccggccgcaccttgcggcgccggtcttgaggcgtggcgtggaagctccatagcgatgccgggcgggatgtccgtgaaccgtccttcgtgacgtgatgggcgagaaccgccagcgttgaggacggcacgcattcgcacaacctgccgcagcaagcaccagcgtgttcgccagctccgtccattgcggcggggcgctggccgggccgatccggcatcgacggttcggcggcatcgaggggcgccaagctcgcgcggcggggatgggccttgcgccgatcccccggaggcaagcgcagcgcgcagcgccgcaggcgcgaaggcgtgagtggattgaagccgaatggccgtgacagcgaagtcggcacggggcgcagcccgaaagcccggcggcgctacgcgccgacacgcccaggccgttctatattttgagcagggaacgcagaaaaccatgaccatccagctacgacacgaaaccacgaacgacattgccgctatcgaggccgtgaccattgccgccttcgccgatgcgccgcacaccagccacacggagcaattcatcgtgcgtgcattgcgcgacgctagcgaactgacgctttccatcgtggccgaagaacacggccaggtcgtcggccatgtggctctgtcgccggtgactatcaccaacgaccacggccacaaggccaaaggctggtgcggcctggggccgatctccgtcctgccgcagaggcaggggcacggcatcggctcgcgcctgatggaacaggcgctgtctgaactgcgggccatgcaggccgaaggctgtgtgctgctcggagagcccgcgtactacgggcgctttggcttccaggcccatgcgggcctgcaactgccgggcgtgccgcccggctattttctcgcactggccttccatgggccagtgcccgaaggcatcgcgcagtacagcgatgccttcaacgccgccgcctgagtgccagtgaaggcggcggcgtaatgccccggctattcggcttcaacaccgggcgcggccaccgccgcgcccggattatgcgtttcaccgcgcccagggcggaacggcctgggcgcggtgctgacgatgatcattccttcgtttcgatgatccaccacacggcacgcggcaaggcgcggcccgtgatgggatgtatgtcggtgaggtcagcgcgggccgaccagcccgagggcggtcggtagccgcgcacgtcgccatcgccgtgccagcggcgggcgcgcaccgtgccgggtgcatagaccgccgccatgcgcgggcggttggtggtggtgcgggtcatgggggcttctccttgcagcgaagcgccccggtcgaagccggggcgcttgccttcggcgtgggtcaagcggccagcgcctcggcgggttcatccgccattgcctcggcatcctccggggcgtcctgctccgggcctgcctcctgcgcgctttccttcactgcctgctgcgggccttcgaccttaaagatggcaggcatccaacccgcgccatcggccagccgctcggcttcgctggcaatgtcggccttcttcagcttcgccagccgggaaacctgatcgggcgcgtactcgcccacggcttgcagaactgccgccttcggaacgtgcttgaaatacccctcggcggtcggctgccaccatgcggccatgtcgaggcccacggcctgcgccagttcctcgccgggctggtgcggtgtggcgcgaggcgtcaccacgtccaccgtggaagccacgcacacggccagcagcttgaccagttcgccttgctccatcgccagcagcgcggcaaacagttcggcgctgtcctcgggcagcttgccgctccacgcctgctgcaattcacgcagcgccacagcggcgggtgactcgggccagtccggggccatgccgtccagccggtcttggactttcaggctcacgcccagcggcaggtcgcgcccgtagtagcggccctgcaagacggtctgcaccatgccatgcaccagcgcggccaccgccacctgcggatgccgggccacctcgatttgcagcgcggcggtgcgatgggcgctcaggcgctgggccagtcggtcggaaatcgctgctgccttgggcggctcgtcgtcctcgccttcgtcatcgttcgcggcatctgggtcgctgaacccttggcgcagcttctccagtgtgcgcagtgccttggcctcggcctcgcgcagcagtccgcgatgaatcaccacctcgccgttgcggccgatggtgacgatggccccggctgcggccttcacgttcgcgccgtacccctgcaagccgtcttccagcgcctgcaactgctcgcccagccgctcgccttcctcttgcagcgcatcggccttgtcctcgtcgtcggcgtccgtcgcggcatcaatggcttcggccacctcctgcatcttggcttgcagcctctcgatgcgctgtgcttcgcgcttgttcggctcgcggcgctccctcggcgcacgctggaaggcgtgcagatcggcatgggtcacgcccggcgtggcatcagcccaagcccagccctcggccttcacctctgcggcgatgcccgccagcttgtcttgcgccagtcgttccagcagcgcggcgtcggtcaggtacacgcctgcatcgccctccgcgaacaggtcgcggcggatgccgccgcccgcctgctcgtaggtgtccagcccgacgaagcgcaccagcggatgccggtaggcgtcaatctcgcgctccgtcagacgttcgcgcaagtgcgagggttggcgctgccattgcggcgcatcgtagaacgcgcattcctgcgcggcgtggtcgtcggtgatggagagcgccatcagctgatcgaggctcacggcatcggcccggtagtcctccatcaaacgcggcgagacattggcgagcttcaagcggcgctgcaccaccagcggcgtaacggagaaatccgccgcaatgtcctcaatcggtcggccttcggccaccagcgcggcgaaggcttcaaactggtctgctgggtgcatggcttcgcgctgcacgttctcggtcaggctggcggtgcgggccgtgccatcggccacctgcaggcaaggcacgtcccaatccttggcgatacggtgcttctttgccagcagcttgagggccgcaaagcgtcggccacctgccaccacctcgtaatgcaggtcatcggcggcgggaatcacgatcaggttttgcagcaggcccacgcgctgaatgctcgcggccagctcggggatggacatgcgcgggacggtcttgcgcacattgcggcccgtggggcgcagcaccagccgcgacagcggaaccagaatcatgtgcttgctcgggtcggcggcttgcagcacgtttgcgcggctgtcgagggcttgagcttcggtgtaagtaacggcgttcatggtgaatctccaatcaagtgaaacaagggaatggaggggaaaccgcccctccggcggggaacacgtcagagggggtcaggccttgagggcgcgcatgccatcggccagcagccacagggcgcggttcaggcgaatgtccgaatcaatgccctgcacggggcgggtctgctgtctgcggccattggcggcgcggccatgcaatccgcccttggtcaggttctcctgcgtgcggttgaacacgctccacaggtcggggcggcggtcgtcgaagcggcgcggcatcaggatttgcgattccgtgacgggcgcgggcttggttgggtcgtcgtacttgagggccagcgcggcgcgggcgaacacttccgattccccggcatccagcgtgatggcctgcatggattcgcgcgattcctgcgcatgctcgaagccgctcagcacctgataggcgccctcgatgacatggcccgccacgtcgcccttgtggggcacgcgcacatcgcccacggtgtcgccgcagacaaggccattgctgcaaacgaagcggaacatgccacccagtaattgatagctgctcgtgccgtcgtgcgagttcagcaggatgatttcattggcttcgcgggcgttgatctggttggcgtggcgcaggcgcagcatgtgtttcgtgtgctcgcgccggccctcgttgcgaacgcgggtctggcacaccatgaagggctgaaacccctctttgcgaagctcggtcagcacggcggcggtggggatgtagctgtaccgctcggaacggctttcatggggggcatccgcgaagatggacggggccacgcggcggatctggtcatcggacagcggggagtcgctgcgcaatgcgggggaatgggaagcgaagcgggatgcgagttgcatggtctttctcctgaacaaaaaggctgttgaagaaaaccgcacaccggattccaagattcgaagcccagcctttcggctgttcggtgcggtcggcgcgaggaacccggttggccctgttgccaccgtctttcctgagttcatcgcccgcgacgaaagggagcgcgcggacgggggccgtcaaggaaacaagcgcagggtggggcggcccgcaggcgcagccgaggacacggccctgcgcgccttgacggcacacggccgcgggctacagtcgcggacaaggtgatgaagtcagggaagaggactggacatggcaacggccatcccacaagccgaccgcacggcaagcgaagcgcgcaggctcgaagctggaagccgggccggaggcgtcagccgaacggagtgagggaacgatcgaagcccgaagggggcgagacgccgcaggcggctcgatgcgctagcacgagagcgcgaccggccatctcccaggtggccggggacgcccacatgacttcaatgaaatccccgtggacagctacccacccagccatcggcaaaatggcaatggcatggacatacgagccctacaagacgatgaactgatggcccaggcccgagactggcggcaacgggcactgcgcggcgagaaggacgcacgcggcctcgcgcacgaactggaatgcgaagtgcgccggcgcttccccaggaacaatgcgccccatgcactgccgccgatccaattgctcggcgccgtgccgcaaacaccccagcggcgctggaagccctggtaagcaccggctcaaaggcagcccgcccgcatgactgcgccacggccgatcggcgctgatcccgaaatccccccgaaatagcgcgaatttcgagtggcccggtcacgggccaatgcctaccgtggaatctccaccttctggagaaccaccatgagcgatcccatgcaacccggaacgcctgcgcctggagcagaagggcctggcatctttctgccgaccctcatctggaccaccgaccgcaagacggtaggcaacgagatgcagcgcctgctgggacggcgcgcacagctcaacgtcctgctgtccgcctccgaagaaacggacgacggcaccacctggtacgcaatggcccaggccacgctgaaccagctggactgcgatatcgaacgtctcttcgagtggctgggcgactacgaacccgacacacccacgcccgaagtgccatcgtaatgtccggcatgaagggagcgatccggcaccagccggttcgctgcgcgagaggggcgccaagcctgcgcggcggggatagcccgcagggctttcccctggaggcaagcgcagcgcgtagcgccccgccaggggcgcgaaggcatcaggccgggtcgtcggggcgcaggctggcttccgacaccggcatccacggcgatgacgagtccagcaggtagcgcgcaccgcgcgcgtacaggcccgaaagtccgctgggacgataaaacccggtgacgcggcaccggaactgtgcgccaaacccgttggtatagatcaccgcgtcgccgagcgcaaagcgcaagggctggccgttctccggtgggaacggcttgaacgcatcatgctctgccgtgatttcgaggatgtagtcgtggtggctgctcatggccttgacctcctgaaatgattgagaacgctcaggagcgccttgcggcgccccagaaccaggtcagacaacgacacgccccgccagccgcgcatcgcgcgcataggcgctcagccgcttctcggcacgaaagtgcagatcccgctctaccggcaagcccagccgcccgcgcacggtcgccagttcggaaagactgacccagccgatttccggcatccctaggcccaggtcgcaaagaccgaaggcgtgatcgtggtcatcgggatcaatctcggtcagcagccaggtcgcgccggcatccggcgtgaacagcttgaccactggggccggatcgaagtccgggttctccaaggattcgcggccgttggccagcagcacgatgcgctgctcgtccgtgatgaatgcgtggttcatggtgaactcctgtaaggttaccgggcggaattgcccagcccttgcagggcacggcgcagcgcaagcagtcaaagatcgaagacggccgccaggccgcaagcgccgaaggtgcgcagtcattgacggcgagcacgccgtggcacgatgaagggaacagcaagccgccacacctcaccacgcagccaccccggtattgacaagcgtagcgcgcaggtccgaagcgtcagtccagatcagagcgtccgggcttgaagccggatgactgcgattcggcacgaagctcggggcgcagcccatgagcccgacgaaggaacgtcgggatgcaggccaagttgtcagcaggcagttgaaaagtggtgctggccttcaggcgctgtcaattttcttgatcttccggatacgccgcctggggaatcggcacccagccatcgcgggtgatgcctgccccgatgcgtatgttctggctttcagttgccgcccagtgcccaccccggtgcaatacggcgcgaatcaccgacttccgcggatgatcctcatccgccttggcagaactgcatatggcattccaatggtgcttgtccggcatactgttcaaccgtgggccgagcagttgatccaagacttcggtcgaaacgttgtgtcgcccgccgtgatggggcacttggaaataccgaatacctggcagcgcgagtcccacgaaaggtgcgtagtcgatcacctcctgcagtgcttcacgcccggcatcgccagtaagcatgacgcgatgaccgttcaagacagccgactgcaccacactcatttcattctcacgactggtcggctcaggcgggaaatattcctcgccccacagggacttgatgtaggcggtcgcggccttcactgcccggaatatgctgctcagcgcgctatcaaaagcactttcttcgacagcttccggtgtcttcgcggagtccacgatcaggtccaagtagcgccccagggtaggtgccatgaccgcgaacggaccgatgctctgcccctgaaggggggcatggattggaattcccttctccaccgcaatatcctcaagaattgccgtggcatcgtagattgagcgcaacttccgtcgcagggcttcaaccgattcataggtctcaaagcgatcgatcaactggtccgcgtatatccacggccggttgatccaaagattcctgaccgtgcattgctccaggacttttcgtagtccgttggcgtgatcgcgatctgggtgcgtgaggatcacatggtcgatgactgttgttccatagtacgtcttcagatgctcgactatctgatcacccgtatccagatacccaccgtcaacaacgtgcacgccctcggtgccattcaccgagtagcgcagcgtgatcgcgtccccgcttttcgctgtttcgacgccaagaaagtcgatctcgaagtagtcagccatacatccctcttgttttatgccaacaaagtgccggtggctttgcacctaccagcgatccaccgcacacgtgagtcctgtcggagtccataccaacgacacggccggaaggccgccagcatcctcggcgatgccgcgcaatgtatttcggtcgatacccgaatgtgcgccgcctttcgggtggctgtgccacgttcctataaaggcgagataccccaaagaggccgcgtttgcggcgcgcaaattttgaacaagcccgttggttccgaggacgaagcgggcggcctctcgaacactgtcaggcggtgcctcaacaaggcctgcaatggtgatggttcgattttcaaacgagatgcggccgatcaaggcgccgcctgtttccagagcaccccagcgcagcgcatcagcatggattgcttgcgcaactggggacaggacccgaatgttccagccaccatcgtctgcgacttcaagcgcagtggtcgggccaaggctggcgcgggtccatgccattccaaggccttcggcatctgagattccggcgcaaagcgtcgcttccttcggaagcccatcaacgagccatcgttccagttgcaggccggccagtgacgtcgaccgcgaaacaacggcgtcagacataggcatcgtcagcgaatgacagttgtcacccacgaaaatccgagtcggctcagacgtctcgccggcaatcgacgcacgcagttccggtgcaaaccggcagcactcgaacaagaacgccgtgaggtcgtcaactcggccggcacggccagctccttcgagcaataccgccacacagcgcccctgaccatacatcgcgatccgtgccaatcgggctggggattgatccaacgctgccgattgtgtttctgcagccagcacctgaagtgacgccgtcgcatccacgatgagggccgcatcctgcggaacggttgccgcaaactgttccggatcgaccaaaagagtcactgcgtcggtgtcgaacgctcgcgattgaagatgcgacagcgattcaaaggctgtcttcatcagcgccgacttccgaggcggaaccagaactgatgcccgctcaatgagtgcatgccgcgcggcgttgtgaggcgacatgggttcgttgtcgacgaaagtcatcgaaccaaagcccgctcgccccagttgcatcgcgactttcgatcccacgcttccgcagccgagcacgaccagcggctgtgatgtggctgcgtatggaatgccggacgtccttgccagcagttcaggagacaacgcatgcgcgtgaaaggccgggtgaaccgtggcgttacgctccaggagcgattgagcgttgagttcatagcgcaccacatagggcaatacctcgacactcctccctggcgagcccacaagcgacgctggcctttgcacagccagaatcacaatcgcgtacaaaccatgcacccagccatgcgagtcctgtcgcatatccaggattgagcgtccgaaataaccgtccacttcctgggccaaagcgtcgcgatcaataccaagctccgctgctcgatcgagcagcgtcgcgagatcgacaactgtctctggttgatagcgtccgatcacatgcgggaggccgtcggtcatcggagcgcgcgcgatgaaggccgcggcatggccgttcccccatttgcccagcttgtcgttgtgaacatcctgataaaacacaggatcgacttgtgcggtcagttcggcgttgatgatggcgtacagaccgccatcgatcgtcacgtagcctgcgggaaccaccagaatcgtgccgtcagcgggagcggcggccgcgaccttctcggcactgaatacaacggtcgaaggacagctgtctcggcgcgttggttcccacccctgctccaggtccaggagtgttccggccgcggccttgtgcagccagtcgatcaactgatcgacaacggcgtccaggccaaaccgatgcagcagctcgttcaacgacccttcgaataggcacggcgagactaactcgccttggcgatgggggttgatgtgcggcaagttgagcgggaagtccgcacgtaagaagggctcgggtgcagacaggggccagtcactaccgaataccagcacgcacgtctcgacggtgcgcactccggtctcagagataccattgcgccgagacctgttcggcagttggaccgcaacatcgacttcaatctccgtcgatgcaccagttgtccttggctcgccaacgcggataaggcctcgatgccgctgaagttgatgcagtgcgtctgcgatggtgcccgtcatgatgctccgtgcggcatgggggtgcgcgcagaggtcaccacggcagcggccttcgatccggactccttcttcgagggaggttgcacaccctgagcggttacggtgaaaacgagcggttccacggacttttcgctggggtactcgcctgtgcagtagaactcgccttttgcttcgtccacgatcgtcacgtactcacgcttcgcacggatgcagggcggatcgctgtcatcatctgcaatcggcttgcagctggcgacgatgacggcgccgtcacgggtctgcgaaagcgccttgcgagcatcagcatcgagcttggctttttcacggtagtcggaccagctgtcataggacagcgaatgccaggaacaatgatgaggcgcctgcatgatgtcgtactcaagcacatctgcttcagccttgtggcgttgccactggcggttccagatgaacacctcagcatcgccaccagtaaggaatttcgcaccatccggcgtctgcgcgtcagccgccaacgtgatgttcagaataacgctggactggttcttgaccaggcactcttcctcttcctcgtcatcctgggcgtccagtggagccaaaagaaacgcagaaaagaatgcggaactcttgccattgatcgttgaaaagcgcgtgtccaccttccgcacaatcgaagtgagatcatcggtttttccgtcgatgtcctcgcccatgatctgaatgcggtcaccgttcccgacggcgaaattcttgtcacggttcagttgcacgcgccgacgcgcctccgtgttgaatgccttggcgtcgtcgctcaaggtgtgcgtcttgctggcgcgtcgaaacacgatcggggacgaccacatctcgcggatcacgattttcttgtccttgtcgtccttcttgtcgtccgggtacttgtcgagtggccctaggtagaagtgtcgcttcaaccctcggcaatggtcttgatccgggtggctcagcaggaacgcatcgacatacggcctgccgttctcatccttcttcagtcgttcgcgcaaatccttggcgacatcgcgcgcctccccgtcagggtcgtcggcgtcttgcctgatgtttacgtcgatcagcagagtcgtcgcgtcgagatcgccgaacttgatgagggtcatgtccccgttgtcgacgggaaaaaacgtgatggttgtaggcactggggtctccgggtagacgaccgaaggatgatcgcgtatagttaatgtacgacgattttttatatccgtctactttttaggcgtgactgatgcaaaaaccttccgttcctgccgccgaacctgctgagcctaaggggctaagttgggggctggagagcagacttcaattcatcgatttccgtctgcgctgggagcggcgcatcaaccggatggatctcaccgagcactttggtatttcggtcccgcaggcatcgctggacatttccaagtacatggagttggcgccgagcaacctgacttacgaccgcagctccaagacctacacggcagcgcagagttttcacccgctttaccaacgaagctcggcgcaacgctatctagcagaactgctagcgacaaagatgggaattgtcgagccgacggccagcttcatcggctccgcgccggagacagattgggccccgtccccttggcgcacgatcaatgagcagaccgtcgaagcagtggtgcgcgcaatccgccagcaggaatccattctggtgagctaccagtccatgacgtcgttggatgaatcggttcgcttgctgtctccccacgcccttggcaatgacggttttcgctggcacatgcgcgcgttttgccacaagcgccagcgcttcagcgatttcgtccttgctcgaatcctgcgcatcgatggcttcgaggcgacccaagtggactccaaccaagattcgcattggcaaactgtattgacgctggtacttgcaccgcatcccgatttgcctgcagccaagaaacgagtcttagagttggactacggcatggaagatggagaggtcaaacttccatgccgccaagcgtttctgtactacacgctgagacgtttgggtttgcataccaaggaagcaccagaccccctcgcacagcagatcacgctaaaaaaccgcgatgaaatccaaccctatatcgacgccttggcggcacaggcctgacttcacatgacaacaatttttgaactggtcaaagacccctacgagcgcaaggcacgtgttatccctggccttcttgtggccttacccgtgctggtgccgctgttgtgcgtctacggggctcggcaccctgtgcttacaggtgtgatcggcctgctgggcggctgcggcgctatctatgcactcgcgagcgtagcgcgcggacgtggtaaaaaacttgaagagatgctggtctcaaaatggggtggcatgcccacgaccatcgcactacgccaccgcgacaagttccttgatggtgtcagcaagcagcgttatcacacggcgatcactgccaagttgggtatcgccatgccaacggcagaagaagaatcagcaaacccagacaaggcagacgacatctacatcggtgccactaagcggcttcgcgaactcacgcgttccaacaagcagctcttgctgaaagagaacatcgcctatggatttcatcgcaacatgctggcgatgaagcctgtcggtatcctgtcgtgcctcatgggcgtcgtctacggattgttgattgcaaagattttgcaggtagcacctctccaatttgacttggtgcaccttgccgatccagggcttgccgcaggcttgacattgctcatttcgctggcgctacttgccgcatggctactgtatttcgatcaggacgcagtaaggcggatgggattcgtctatgcggaacgtttgtttgaatgtttgccgtcgttgccttcttcctcctcacggaagaaagccgtaaaaccgactacagactgaggttctgcccaatctccaaacaggcgtatagctccgcaggtgtgtctaccgcttccacgtcttgggacgaatcgttccgcgagactccagcaagagccgcgtgctttccagttccttttgcagcacatcggtatccggcagaaccatccggtagttcgccgccatgaccttggtgggtaagccctccagcgcataccgcgccagggcgagccccttgtcggcacaaagaatcagccccaccggcgggttctcctcgggataggcccagtgttccttggcatagttgcagtacatgtgcatctggcccacgtccgcatgcgtcagactccccagcttcaggtcgatgatgaccaggcagcgtaacttgcgatggaacagcagcaagtccacccgataccaggtctggtcgatgcgcaagcgccgctgccgtccaatgaaggtgaacccttcacccaattcgagcaggaagtcttccagccgccggatcaaggcggcctccagatcggactccgaatactcgtccttgaggtcgaggaactccagcacataggggtctttgatggcatcgccgggcgcgacggcatcttcgggcttggccaccgcgcccttggccagcatcgccgccttgtttttcgacagcgccgtgcgctcgtagaactggctgccgatctgccgatccaactggcgcacgctccagccgccgcgcaaggcctcggcttcatagaactggcgcgcatgctcgtccttgaccgacaacagccgcacataggccgaccacggcagcgtgaagacctgcgccagctcgtccagccgccaaggccgcactggctccggggaagattcgccagacactgtctggcgaattggccgggtcagaaaaaacgaccgcatctgctgcaggttctgacggctgaagccacggccgaactgctgggtgaggtcgcttgccagccgctcgatcaactgctcgccataacccgcgcgccgcttgccctgttgctcggcctccacgatgcggcggccaatctcccagtagctggccgtcatcagcgcattgacgctgcgcgctgccgtctggcgcgcggcatcgagcagatccacgatgccgccgtggatgccggcgtagccggcaggcacggcggcgggtgcgactcccgccatcgcaggcgccttcttggtcatgcagccacctccgcaggccgctgcgcctcggtgatcgtcttgcgccggttcgccaccagctcggccgccttgcgcaccggatcgtcctcggtgtggacgtagcgcatgaacatcgccacggtcttgtgcgccgtcagcgccatgccgaccttgaccgggatgcccgagttggcaatgtcggtcgcggagcggtggcggatgccatgcgtgccgacgtgcgtggcgcccgccgccttgagggcgcggctccagccgccgtaatactcgcccgtggtcaggtgcttgccgggatggcttggagacggcagcacatagggagtgccttcctgccgtggcgccgtcgagagcagtcgataggcttcctcgctcatgggcttggacatgccgcccgtcttgctgtccggccagaccacgcggcggttgtccaggtccacccaatcccatcggagcgtcacgatttcggagcggcggccggcgaactcgaattgaaggcggatcgccagcgggatgacgtagttctccagaccctcggcttcgatgtgctccagtcgccgaaacagcttgcccatgtcctcgtcgctgatgaggtgggtggccttgccgttggggtacatcgggacgtggcggcaggggttggtgccgtcaggccggtggccccacacctcggccaggttgaacatcttgcgcatcacgctgaaagcacggttggcctcggccggcttgtgcgccatcttcttcatcgccgtggccacgtccgggcgcttcacgtcctggaccttcaaacggcccagcatcggaacgatgcagcggtcgatgacggcctgatacccgcgctgggtgctgggcttgttgcgctgcttggagtaatcctccatgaacttggtacacagctccttgaccgtgggggctgaacgggcggcggccttggccgcgctggggtcgccgccccggcgcacctcggccagccattcctgggccagcgagcgggcctgctcgacggtcagttccccgtacaggcccagggcgggcttgcgccgctcgccagcgttcgtgcggtactggagcatgaacaccttgcggcccgctggtgtaaccttgcacaggaagccgggcaccagcgtgtcccggagttcgacggcctgcgcctggggttgtgccgcatcgactgcggacttggtgagcttgagttttgccacgatgactcctcggaaagacccgattcccaagagccatgtaggggccatcagaggggaagccgggtcaggtttcggaaagcaccggcatatgttggactcgcctaagttattgataaacctgctgtatcgggcttcggcgtagtccagcaaagttcggtgctggagtcatggtgaaatgaaaaagccccgcatccgcggggctttttcatggctgcgagacgatcagatcgcctggcgctcgcgcaacaggtcgagcacctgcttcacgccgtcctcgacgctcagcgcctgggtatcgatcaccaggtcggcatccagcggcacgtcgtaggggaaggactcgccggggatattgtcctcgcccgccgcatacagcccctgtggatcgcgttcgcggcaaacctgcggcgacgcctgcacatagacggtgatcaggcgctcggcgccgatcagcgccctggcctgctcgcgcccttccgcgctcggcgcgacgaaggcgcagaggctgatcaacccggcctcgttgaactgcttggcgacatgggcggtgcgcagccagttctcggtgcgtccggcgcggtcctgcggcaaccccttgttcaggtcgtggcgcaggttctgcccgtccagcacgtagaccgcgcggcccatatcgaacagcttgcgctccacggcgtaggccagggtgctcttgccggcgccggagaggccgctgaacagtatggtcgccggctgctggccgaagcggccggcacgctcctcgcgcgtcacatgggcattcgaactgtgatgagcgctgctgccatgggccgccgacggagcggagatgatcatgccggcgccaacggtgccgttggtcaggcgatcgatgacgatgaaggcgccggtggtgcggttctgctcatagccatcgagcgcgatgggcgcgtccaggctgaccttgaccctggcgatctcgttcagcttcagctcgctgcccggggtccgctccagagtattcacgtccaccttgtggacgatgctcggaatcgaacccggcacatagctggtagcgcgcttgatatcgtacttcttgcccggaagcatcggctcctcggccatccacaccagcatggcatcgaagccgtcggtgaccagcgggcgattgtcggcatgcaccagcatgtcgccgcgggaaacgtcgatctcgtcttccagggtcagggtgacggcctggccgggaccggcctgctccagttcgccctcgaaggtgacgatggatttcaccttgctgcccttgcccgacggcaatgccaccacttcgtcgcccttgcgcaccacgccgctggccagggtgccggcgaaaccgcggaagttcaggttcggccggttcacgtactgcaccgggaagcgcatgtcatcgaggttgcggtcggcggcgatctcgacggtttcgaggatttccatcagcgactggccggcgtaccagggcgaacgctcggacttgttgaccacgttgtcgcccttgagcgccgacatcggcacgaagtgcagcgaactggtcttcagaccgatcttctcggcaaaggccaggtagtcggccttgatctgttcgaagacaccctggtcgaagtccttcaggtccatcttgttgatggcgaccacgatatgccggatacccagcagggacgcgatgaaactgtgccggcgggtttgggtctgcacaccgtagcgggcatcgatcaggatgatcgccaggtcgcaggtcgaggcaccggtagccatgttgcgggtgtactgctcatggccgggcgtgtcggcgatgatgaacttgcgcttggcggtgctgaagtagcggtacgccacatcgatagtgatgccctgctcgcgctcggcctgcaggccatcgaccagcagcgccaggtcgacgtcgtcgcccgtggtgccgactttcttcgagtcgcgggtgatggcctccaggtgatcctcgtagatcatcttggagtcgtgcagcaggcgcccgatcagggtgctcttgccgtcatcgacgttgccgcaggtaaggaagcgcagcagttccttgcgttcgtgctgccccaggtaggcgaggatgtcctcgctgatcagatcggattgatgagacatgctgcgtatcctcagaaatagccctgacgtttcttttcttccatcgaaccggcctggtcatggtcgatgacccgaccctggcgttcggaagtacgcgtcaggagcatttcctggatgatttccggcagcgtggtggcgctggactcgaccgcgccggtgagcgggtagcagccgagggtacggaagcgcaccatgcgcttctcgatgcgggctttctcttcgtcagagagatgctcgaggatgcgctcgtcgtcgatcatgatcagcgtgccgttcttctcgatgacctcgcgctcggcggcgaagtacagcgggacgatcgggatgccttccaggtagatgtattgccagatgtccagctcggtccagttggacagcgggaagacgcggatcgactcgcccttcttcaccttgccgttgtagatgttccacaactcgggacgctggttcttcgggtcccagcggtgcttgctgtcgcggaacgaatagacccgttccttggcccgcgacttctcctcgtcgcggcgcgcgccgccgaaggcagcgtcgaaaccgtacttgtccagggcctgcttgagtccctcggtcttcatcacgtcggtgtgcttggcgctgccgtgggtgaacgggttgatgccctgggcgacgccgtccgggttgacgtgggtgatcaggtccaggcccatttcctcgaccatccgatcgcggaacctgtacatctcctggaatttccagcgggtgtccacgtgcatcaccgggaagggcagcttgccggggaagaaggccttgcgggccaggtgcagcatgaccgcggaatccttgccgatcgagtacagcatcaccgggttatcgaactcggcggccacctcgcggatgatgtggatgctttccgcctccagctgtttcaggtgcgtcagtttgtcgaccatggctactcacggaattgcttatggacggccgtcgggccgtagacgaacgcgcactctatcacagcgcaaggctctaaaagattcgccatttataccgaaaaaatatacccatatagccatcagcgctcagcctcgcagccggcgaaaacactggcgtcgagaggttttccaggggcgtttcgcagaccgggcggacaaagctgagacggcatcgtcccggaccggacaaagccgtcgccgcgacagcgagcagacggtccgccccctttcggcggctcgacttgtacgccggcggcactgcgctagcatagcgggcatcgtcattccgccaagaagcccccagatgcgccgtaccgccctcgccctgcccctgttccttctggtctcagcatgcagcagcgaaccgacgccaccaccgaaacccgccgccaaaccccaggctcgcaccgtcatttcaccccgccccgtacgccagtcggtgcaaccgatactgccgctgcgcggcgattacgcgaacaatccggcggcacagcgcttcatcgacaggatggtcagccagcacggcttcaaccgccagcaactgcacgatctgttcgcccagacccagcgcctggactgggtgatccgcctgatggaccggcaagccccgacctataccccacccagcggaccgaacggcgcctggctgcgctaccggaagaagttcgtcacgccaggcaacgtacagaacggcgtgctgttctgggaccaatacgaaaccgacctgcaacgggcatcgcgcgtctacggcgtgccgccggagatcatcgtcggcatcatcggcgtggaaacccgctgggggcgtgtgatgggcaagacgcggatcatcgatgcgctgtccaccctgtccttctcctaccctcgccgcgcggaattcttcagcggcgaactggagcaattcctcctccaggcgcgcaaggaaggcaccgacccgctggccctgcgcggttcctatgccggcgccatgggctacggccagttcatgccgtcttcattcaccaagtacgcggtggacttcgatggcgatgggcatatcgacctgtggaatccgcgtgacgccatcggcagcgtcgccaactatttcaagcagcacggctgggtcagcggcgatcgcgtggcggttcccgccagtggccgggctccctcgctggaagatggcttcaagacgctgtacccgctggacgtgctcgcttccgccggattacgcccgcagggtccgctcggcggccaccggcaagccagcctgctgcgcctggacatgggcaggaactaccagtactggtacggcctgccgaacttctacgtgatcacccgctataaccacagcacccactacgcgatggccgtctgggaactgggcaaggaagtcgaccgggtgcgtcaccgctccgtcgtcaggcaggattaggacagtcgatgaacaagtgctcgatggcgaagcgcttgcccaggtagtcgcccagcgcctgtaccccgtagcgctcggtggcatggtgtccggcggcgatgaagctgatgccgttctcccgcgcgctgtgcacggtctgctcggaaacctcgccggtcaggtaggcatcgacgccagcggcgatcgcctggtcgatatagccctgggcgccgccggtgcaccaggcgatgcgccggatcggctgaccggcatcgaccagcagcggctcacgccccagcgcatcgcgcacatgccgagcgaaatcggcaggctgcatcggctcggcaagcgaaccgaggaggacgatggaacgcgggttgcccggctccaacggcccttccacttcgaagccgagctgccgggcgagctgcacgttgttgcccacctccggatgcagatccagcggcaggtggtaagcgagcagactgatatcgttgttcagcagggtcttcaggcgccgttgcttcatgccgaccacgcaggggttctcacccttccagaagtaaccgtgatgcaccagcaccacgtcggcgtcggcctccacggcggcatccagcagcgcctggctggcagtgaccccgctgacgatccgccgcacctgcggccggccttcgacctgcaggccgttcgggcagtagtcctggatgcgcgcggcatccagataacggtcggcctcttcgaccagggtgctcagggcgatagccatgcaaattcctcttcattcaggcagggcgcgccgctcctctaatggacggcttccccctataatgggcgccaccttatcggccgcttttcggcctcgcaaccccaaggattttcccgatgcccaaggccctgcgtttcctcggctggcccgtgctggtcggcgtgctgctggccctgctgatcatccagcacaaccccgagctggtcggcctgccacgccaggaggtgcacgtcgagcaggcgcctctgctcagccgcctgcaggaaggcccggtgtcctatgccaacgcggtgagtcgagcggctccggcagtggccaacctgtacaccaccaagatggtcagcaagccctcccaccccctgttcgacgacccgatgttccgccgcttcttcggcgacaacctgccgcaacagaagcgcatggagtcgagcctcggctcggcggtgatcatgagcgcggaaggctacctgctgaccaacaaccacgtgaccgctggcgccgaccagatcatcgtggccttgcgcgacggccgcgaaaccatcgcccagttggtcggcagcgacccggaaaccgacctggccgtgctgaagatcgaccttaagaacctgccggcgatgaccctcggccgctccgacggcattcgcaccggcgacgtctgcctcgccatcggcaacccgttcggcgtcggccagaccgtgaccatgggcatcatcagcgccaccggacgcaaccagctcggcctgaacacctacgaagacttcatccagaccgacgcggcgatcaaccccggcaactccggcggcgcgctggtggacgctgccggcaacctgatcggcatcaacacggcgatcttctccaagtccggcggctcccagggtatcggcttcgccatcccgaccaagctggccctggaggtcatgcagtcgatcatcgagcacggccaggtgatccgcggctggctcggcgtcgaggtcaaggcgctgaccccggaactggcggagtcgctgggcctcggcgaaaccgccgggatcgtcgtcgccggcgtctatcgcgacggcccggcggcgcgcggcggcctgctgccgggcgacgtgatcctgaccatcgacaagcaggaagccagcgacggccgccgctcgatgaaccaggtggcgcgcacccgtccgggacagaagatcagcatcgtggtgctgcgcaacggacagaaggtcaacctgaccgccgaggtcggcctgcgtccgccgccggcaccggctccacagcagaaacaggacggcggcgagtgatccccgccattgaaaacggcgccctcgggcgccgttttcgtatcacttgaggaagtgcagggcgtccagtagcgcctggttctgctccggactgccgatggtgatacgcaggaactggtcgatccgcgcctgcttgaaatggcggacgatcactccctgctcgcgcagggtcgaggcaatctgcccggcatcgtgccgcggatgacgggcgaagacgaagttggcggccgacggtagtacctcgaagcccagcgcctgcaaagaggcgctcaacgcctcgcggctatcgatcactgcctggcaggtccgacggaaataagcgtcgtcctcgaaagccgccgccgcgccggcgatcgccaggcgatccagcgggtaggaattgaagctgttcttgatccgctccagcgcctcgaccagatcggcatggccgaccgccaggccgacccgcaggccggccagggagcgcgacttggacagcgtctgggtgaccagcaggttcgggtagcgatcgaccagggcgatggcgctctcgccgccgaagtcgacataggcctcgtcgactaccaccaccgaatccggcgacgccttcagcatcgcttcgatggcgtccagcggcagcaggcagccggtcggcgcgttcggattggggaagatgattccgccgttgggccgcgcgtagtcttcgacgcggatgcggaacctttcatccagcgcgatcttctcgtgcgcgatcccgtacaggccgcaatagaccggatagaagctgtaggtcacgtccggaaacagcagcggcaggtcgtgttggaagaggccatggaaaatgtgcgcgagcacctcgtcggagccgttgccgacgaacacctggttggcctgtacgccgtagtgcgcggcgaccgcctgcttcaaccgctcgccgttgggatcgggatacaggcgcaggtcgtcgttgagttccgcctgcatcgcggcgagcgcctgtggcgacggaccgtagggattctcgttggtgttcagcttgaccagccgcgacagcttcggctgctcgcccggcacataaggcaccaggtccttgacgaagggactccagaatttgctcatgctcaggcctccttctcgtcgaggatgcggtattcggcactacgcgcgtgggcggtcaacgactcgccgcgagccagcaccgaggcggtacgaccgaggaccgaagcgccctcggccgagcagttgatgatcgacgaacgcttctggaagtcatatacccccagcggcgaagagaaacgcgcggtaccggaggtcggcagcacgtggttcgggccggcgcaatagtcgcccagggcctcggcagtgtagcggcccatgaagatcgcgccggcatggcggatctccggcagccagctttccggatcggccaccgacagctccaggtgttccggggcgatgcggttggcgaccgcacaggcctgggcctggtcggcgacctggatcagcgcgccgcgcccctccagggaggtgcggatgatctcggcgcgctccatggtcggcagcaggcgagcgatgctgtccgcgacgcggtccaggaacgccgcgtccggactgaccaggatcgactgggcgtcttcgtcgtgttcggcctgggagaacaggtccatggcgatccagtcgggatcggtctggccgtcgcagaccacgaggatttccgagggaccggcgatcatgtcgatgccgacctggccgaacacgtgacgcttggcggtggccacgtagatgttgccggggccgacgatcttgtccacccgcggcacgctttcggtgccgtaggccaacgcggccacggcctgtgccccgccgatggtgaagacacggtcgacgccggcgatgcaggcggcggcgaggacgatctcgttgatctcgccgcgcggggtcggtacgaccatgaccacttcggtcaccccggcgaccttggccgggatcgcattcatcagcaccgaggacgggtaggacgccttgccgcccggcacatagagcccggcgcggtccagcggggtgacctgctggccgagcaccgtgccgtcggcctcggtgtagcgccaggaaccctgcttctgcttctcgtggtagctgcgcacgcgctcggcggcgacttccagggcttcgcgctgggctacggtgatacgtgtgagagccagctccaggcgctcgcgcggcaggatcaggtcggccatcgaggcggcctggagaccgtcgaagcgctgggtgaactcgaccacggcggcgtcgccacggctgcgtacggcggcgatgatgtcgaggacgcgctggttgaccgaatcgtcggagacactttcccagctcagcagatgatccagatgacgcccgaagtccggatcagcggcattgagtcgacggatagcgaagggagcggtcatagcgagcctcttttatggatggcgttgtctcgggcgccgctagactaccaagcccaccgtgcgggcacccgagaaaatttggctatgacacggataggcaggtgcggcgcggagccgcacgggtatcagtgacggtgtcgcgcctcgacggcgtcgcgcagggtatcgatcagcgactggatgcgaccgtgctgcatcttcatcgaggccttgttgaccaccaggcgcgagctgatcgtggcgatcagttcctggggctccaggccgttggcgcgcagggtattgccggtatccacgacgtcaatgatcttgtcggcgagaccgaccagcggcgccagctccatcgagccgtacagcttgatcacgtcgacctggcggccctgctcggcgtagtagcgcttggcgacattgacgaacttggtggccacccgcaggcgtcccttgggttcaggcgcgccaatggcgccggcggtcatcagcttgcagttggcgatacgcaggtccagcggttcgtagagtccctggccgccgtactccatcagcacgtccttgccggccacgccgagatcggcggcgccatgctcgacataggtcggcacgtcggtggcgcgcacgatgagcaggcgcacatcggacagggacgtcgggatgatcagcttgcggctcttgtccgggttctccgacggtacgatgcccgccgctgcgagcagcggcagggtatcgtcgagaatccggcccttggacaaggcgatggtcagcatttgcgcgacagcctccgctagcccggtacgcggcggatcttggcgccgagcagctggagtttctcttcgatgcactcgtagccacggtcgatgtggtagatgcgatcgatcagggtgtcgccttcggccaccaggccggcgatcaccaggctcgcggatgcgcgcaggtcggtcgccatgaccggagcgcccttgagcttgggtacgccggtgacgatggcggtgttgccttcgacgaggatttgcgcgcccatgcggttcatttcgtaaacatgcatgaagcggttctcgaagaccgtctcgatgaccgcgccggtgccttcggctaccgcgttcatggagatgaactgggcctgcatgtcggtggggaacgccgggtacggcgcggtacgcacgttgaccgccttcggccggttgcccttcatgtccagctcgatccagttgctgccggtgctgatgtgggcaccggcctcttccagcttctgcaggaccgcctcgaggatggtcgggtcggtatccttcagcttcacccggccaccggtcgcggccgcggccaccaggtaggtgccggtctcgatacggtcgggcagtacgtcgtagcgagcaccgccgaggcgcttcacgccttcgatgacgatggtatcggagccagcgccctggacgttggcgcccatggcgttcaggcagttggccaggtcgaccacctccggctcgcgagcggcgttctgcagcacggtacggccgttggccagcgcggcggccatcatcaggttctcggtgccggtcacgctgacggtatcgaagaagaagtgaccgccacgcaggccgccggccggcgccttggccttgatgtagccgccttcgacctcgatctgcgcgcccatggcctcgagaccgcggatatgcaggtcgaccggacgcgaaccgatcgcgcaaccgcccggcagggccacttcggcctcgccgaagcgcgccagcatcgggcccagcaccaggatcgaggcacgcatggtcttcaccagttcatacggcgcgaccagggtcttgatgctgctggcatcgacttcgacgttgagcttctcgtcgatgatcggctgcacgcccatgcggccgaacagttcgatcatggtggtaatgtcgtgcaggtgcggcaggttgcagacggtgaccggagtatcggccagcagggtcgcggccaggatcggcagcgccgagttcttcgcgccggaaatgcggatttcgccatcgaggcggttaccgccggtaataatcagtttatccattgcaatgatcccccgtgggctcaggaacgctcggcccaggcggcgcggctgaagaatttcatggtgacggcatggatgctgccatcggcgatccaggcgttcaaatgggcgtagacctgctgctgacgcttgaccgggctctggccggccagttcgtcgctgatcagattcagttggaaattgcacccttcgccctcgacttccacctgggtgccggggagtttttcctggagaaggctcttaacgtcttcggcctgcatgctcaacctcaatcgggcgccctacgcgcacggtcggccatcatacaaaaaagccctccgcctgcgaaccccaggaagggacgcgcagacggagggccgctcgttccgccggccggtcattcctgcaaaggcaggatctccagaaggctgctgaccttggcaatctcccgcatgtcgtccggcaacgccctgacgctcaggaccttgccggccttgcgtgcgtcgcgcatgaaggccagcaacagggaaatgcccacgctgctggagcgctccaccgccgagcagtcgacgaccagttccgccgcctggctggcgcgaatcagccgaccgccctgctcgcgcaacgccggcccgctgctgtagtcgagcacgccggcgagctgcagttcgccggccgcgccttcgcgcaggctggcctggctcatttcgccccggcctcttccgctttcgcggtttccttggccttggcgaccacctcgccccagccggcgatggtcttctcgaggtcgttgcggttcttctgcatggtgtcggcgaactggtcgcggaacagcttgccgatgttgatgccgttgatgatcacgttgcggaccttccagccaccggccaggttggtcatggtgtaggagaccggatagaccgtgcccttgctgtcacggatctccatgttgacgctggcgcgatcgtcgctcggcttggccgaactaggcagcacgcggatgtcctggttgtcgtattcgagcagcgcgttgccgtagaactgcatcaggctgttcttgaacacttcctcgaagcgcttgatttgctcgggtgaggcctggcgcgagtacttgacggtcatcacgctcttggcgatgccttcggcatcgaccaccggcccaaggatacgatcgagagtggcgtagagcttttgcggatcggccttgtaggcggccttgttggccttgatgtcggaaagcagttcgtcgaccgtgccctgcaccacctgttgcggggtcggcgccgccatggaaagcagcgggaaagccgccaggaacaccagcaggccgcgacgcagaagagtcagcatggaagaaaacctcactttttggcttcgtctttgttaaccgagttcagcaggaacttgccgatcaggtcttccagcaccagcgccgactgggtgtcgtggatggtgctgccgtccttcagaacgtcctcgtcgccgccgacgctgatgccgatgtatttctcgcccagcaggccggcggtcaggatcgacgccgtggaatcgaccggcaggttgttcacgttctggttgatctccatggtcacgcgaccagtgtagctgtcgcgatccaggtcgaccgccgtcaccttgccgatcgtcacgccggccagggtgaccttgccgcgcacggtaacaccggcgatgttgtcgaagtaggcgtagaccttgtaggtatcaccggcgttgcccacgctcaggccgctgacccgcagggccagcagcaacagggccagcaggccggccaggaggaacaggccgacaccgatttccagggtgcgggtttgcattcagaaatctccaaacatcaaagcagtcagaatgaagtcgagccccagcaccgccagggaggcatagaccacggtccgggtcgtcgcccggctgattccttccgaggtcggctcgcagtcgtagccttggtagaccgcgatccaggtcaccacgaaggcgaatacgatacttttgatcacgccgttgagcacatcctcggtgaactgcacgctgttctgcatgttcgcccagaacgacccctcgtatacgcccagccagtcgaccgcgaccatcgccccaccccagatgccgaccacgctgaagatcgcggcgagcagcggcatggagatgaaaccggcccacaggcgcggcgcgacgatgtacttgagcgggtcgacaccgatcatttccaggctggaaagctgttcggtggccttcatgttgccgatttccgcggtaagcgcagagccggcacggccggcgaacagcaggccggtcaccaccggccccagttcgcgcagcagggtcagggccaccatctgcccgaccgcctgctcggaaccataggaaatcaggatgttgtagccctgcagggccagcaccatgccaatgaacaggcccgagacgacgatgatcgccagcgacagcacgcctaccgagtagagttgcttcaccagcaggtgcaaaccggtgcctggcgtgcgccggccgagcagggcgtggccgaggaacagggtcgagcggccgagcgcggcgaccacgtccaggccggcgcggccgaacagccggatacgttcgaggggagagactctacgcatcagcgctctcccagcaggtcggcccggtagtcgcgggccggataatggaacggaacgggaccatccgggattcccttgacgaactggcggatacgaggatcgtcggtttccttgaggacgtccggcgtcccgtggccaagtacccggccgtcgccgacgatatagatgtagtcggcgatgctggcggtctcggccaggtcatgggaaaccacgatgctggtgatgccgagggcatcgttgagcaggcggatcaggcgcaccaggacgcccatggcgatcggatcctgccccacgaacggctcgtcgtagagcaggatctgcgggtccagggcgatcgcccgggccagggcgacgcggcgcttcatgccgccggaaagctcgtccggcatcagttccacggcgccgcgcaggccgacggcctgaagcttcatcaggacgatgtcgcggatcatctcttccggcagttgggtatgcacgcgcagcggaaatgcgacgttctcgaagacgtcgagatcggtgaacagcgccccgctctggaacagcacgccgaactgcttgcgcatgtcgaacaggtcgccgcgcgaaagctgcggcaggttctgcccgttgacccagacctcccccttcgaaggacgcaactgggaggcgatcagccgcagcaacgtggtcttgccgcaaccggacgggcccatgatgccggtcacctttccgcgcgggatacgcacatcgatgttgtcgaaaatcgcccgcgatccgcgcttgaaggtcaggcccttcaactcgaccgcgtaggcactatcggtgctcatcaggactccttgcgatgcgacccgtccatgctggacgccttgccccgttgcaaaggcacgcatcccggaggggtcgaatgggcgcggactatagcactgcggcgggttctggcccaaggcctggcaccgtgccgttcagcttggattcagcttgttcggagcgttctctcagccctttaggacatatcgcacacttcaggttcactacggacagaaaaaaatcgcgtcgacgtcgaatatatcgacatttatgcagtcatagcgcggagtgcagataacggcggcgtaacagagcattgcagtccatacaacattgcgccgcgggggatgcggaccgacttcacagcatggctggtgtaagcggggcacgctttcccgttataatcccgcctttaatccaggcgccacattcgttgaacatgagccagaacctcgatttcatccattccgcccagcgcaccatcggcctcgagcgcgacgcggtagacagcctgctggcgcggattggcgacgatttcgtcaaggcctgcgaactgctgctggccggcaagggccgggtcgtcgtcgtcggcatgggcaaatccggccacgtcggcaaaaagatcgccgctaccctggccagcaccggcaccccctccttcttcgtgcatccggccgaggccagccatggcgacatgggcatgatcaccaaggacgacgtggtcctcgccctgtccaactccggctcgactgccgaaatcgtcaccctgttgcctctgatcaagcgcctgggcatcaccctgatcagcatgaccggtaaccccgagtcgcccctggccaaggctgcggaagtgaacctggacgccagtgtcggccaggaagcctgcccactgaacctggccccgacctcctccaccaccgtaaccctggtcctcggcgacgccctggcgatcgccctgctcgaagcccgcggctttaccgcggaagacttcgccttctcacacccgggcggtgcgctgggccgccgactgctgctgaaggtggaagacgtcatgcacgtcggcgaagggctgccgcaggtgctgctcggcacctcgctgaccggcgcgctgatggaaatgacccgcaagggcctgggcatgaccgtagtgctcgacgaacatggcaagcttgccggcattttcaccgatggcgacctgcgtcgcgccctggatcggggcatcgacgtccgccaggtcaccatcgaccaggtgatgaccgtccacggcaagaccgtccgcgccgagatcctcgccgcggaagccctgaagatcatggaagacaacaagatcggcgccctggtggtggtcgacgcggacgaccgtccgatcggcgccctgaacatgcacgacctgttgcgcgcaggagtgatgtaatgagcgatacccattcggccgcggaactcccggtccgggccagccggatacgcctggcgatcttcgacgtcgacggcgtgctgaccgacggcaagctgtatttcctcgtcgacggcagcgagttcaagaccttcaacaccctggacggacatggcatcaagatgctcatcgcctccggcgtgcgcaccgccatcatcaccggccgcgacactccggtggtcgaacggcgcgcgcgcaacctgggcatccagcatctctatcagggccgggaagacaagctcgccgtcctcgacgaacttctcggcgaactcggactaggctatgagcaagtcgcctaccttggcgacgacctgcccgatctgccggtgatccgccgcgtcggtctgggcatggcggtagccagtgccgacccgttcgtgcgccagcatgcccatggcgtcaccgcggcccgcggcggcgaaggcgccgcccgcgagttctgcgaactgatcatgcgcgcccagggtacgctcgaagccgcccagggcgcctatctgtagagccgaccatgccgaagacactacgccagaaactgctgctcgccctgatcgccctgttgctgatcgtcgcgggctactactggaacgtcgggctcgagctgttcaacgaacagccgacccgccccggccaggacaacaccatcgactactatgccgagaatgcccatagcctccagtaccaggaggacggcagcctcgactacgagatgaccgcggtgaagctggagcaccagaaagccacggacatcactttcgtcaccacccccgacctgctgctcttccgtggcaacgtgcaaccctggcacatccagagcgcccgcgccgaagtcggaccgaaaggcaaggaggtcgaactcatcgacgacgtgcgcgtcgcacgtaccgatgccaagggccaaccaagcatcctgaccaccactcggctgaccgtattccccgacaagaattatgcacagaccgagcaagccgttaaaatcgacgcggccaatggagtgacgacggctgttggaatgaaagcgtatctgaaagacagccggatgcacctgctgtccaacgtaagaggtcagcatgaggttcgttaataccctcccccttattttcggtctgactgccgccctcggcagctccatggccttggccctgccttcggaccgcgaacaaccgatccgcgtccaggccgacagcgccgaactggacgacaagcagggcgtcgcggtctaccgcggcgacgtcgtggtgacccagggcagcaccaagctgaccggcaacaccgtgaccctgaagcaggacaagaacggcgacatcgaggtcgtgacctcggtcggcaagcctgcctactatgagcagaaacccgctccggacaaggacgtgaccaaggcctatggcctgaccatccagtacttcgtcacgcagaaccgggtcgtgctgatcgaccaggccaaggtgatccaggaaggcaacaccttcgaaggcgagaagatcgtctatgacacccagcgccagatcgtcaacgcgggtcgtgccaccggctcccaggtgaccagcccgcgcccgcgcatcgacatggtcatccagccgaagaaaaaggcccagtaatggcaacgctcaaagcccagcacctggccaaaagctataaaggccggcaagtcgtccgcgacgtcagcatgtccatcgatagcgggcagatcgtcggcctgctcggtccgaacggtgccggcaagaccacctgcttctacatgatcgtcggcctggtccaggccgaccagggcgtggtccgcatcgacgagcagaacgtcacccacctgccgatgcacgggcgcgcccgggccggcatcggctacctgccgcaggaagcctcgatcttccgcaagttgtcggtatccgacaacatcatggcgatcctcgagacccgcagcgacctcgatcgcaacggtcgcaaggaagccctggaaggcctgctgcaggaattccacatccaccacatccgcgacaacctcggcatgagcctgtccggcggcgaacgacgccgggtggaaatcgcccgcgccctggccagcgcgccgaaattcatcctcctcgacgagcccttcgccggcgtggacccgatctcggtcggcgacatcaagcagatcatccatcacctcaaggcgaagggtatcggcatcctcatcaccgaccacaacgtccgcgagaccctggacatctgtgaaacggcgtatatcgtcaatgatgggcagttgatcgcggagggggatgccgagagcatcctcgccaacgacctggtcaaggaagtctacctggggcacgagttccgcctctgaagaagtctcctagcgcgccctccggcctcgccggagcggttccgctcgcccgcggtttcgcaaccacgagtgccgcctggagcggatgatttattcagagcaaccctaggcaaagtacgaaaattcaggcatataatttgcttcctggcggtgccgccacctcggcacccgtagtagtggatggtgccatccggtaccagcgaataaggtactaagccctcagccatgaaaccatcgctagtcctcaagatgggccagcagctgacgatgacgccgcagctgcaacaggccatacgcctcctccagctatccaccctggacctccagcaggaaatccaggaagcgctggaatccaatcccatgctcgaacgccaggaagacggcgacgatttcgacaacagcgaccctctcgccgatggcgccgaacaggcggccagcgcgccccaggagagccctctccaggaaagcgccacccccagcgtcgaaagcctcgacgacgaccagtggagcgaacgcatacccagcgagttgccggtggataccgcctgggaagacatctaccagaccagcgccagcagcctgcccagcaacgacgatgacgaatgggacttcaccgcgcgcaccagcagcggcgagagcctgcacagccacctgctctggcaggtcaacctggcaccgatgtcggacaccgatcggatgatcgcggtgaccatcatcgatagcatcaacaacgatggctacctcgaagagtccctcgaagaaatcctcgccgccatcgatccggaactggacgtcgagctcgacgaagtggaagtcgtgctgcgccgcatccagcaactggaacccgccggcatcggcgcccgcaacctgcgcgagtgcctgctgctgcaactgcgccagttgccgtccaccacgccctggctgaacgaagcgctgcgcctggtatccgactacctcgacctgctcggcggccgcgactacagccaattgatgcggcgcatgaagctcaaggaagacgaactgcgccaggtcatcgagctgatccagtgcctgcatccccggcccggttcgcagatcgaatcgagcgaagccgaatacatcgtccccgacgtcatcgtgcgcaaggacaacgagcgctggctggtcgagctgaaccaggaggcgatgccacgcctgcgcgtcaacgccacctacgccggcatggtccgccgcgccgacagcagcgccgacaataccttcatgcgcaaccagttgcaggaagcccgctggttcatcaagagcctgcagagccgcaacgaaacgctgatgaaggtcgccacccagatcgtcgagcaccagcgcggtttcctcgactacggcgaagaagccatgaagccgctggtcctgcacgacatcgccgaagcggtgggcatgcacgaatcgaccatttcgcgggtcaccacgcagaaatacatgcatacgccgcgcggcattttcgagctgaaatatttcttttcaagtcacgtcagtaccgccgaaggcggggaatgctcgtccaccgcgatccgcgcgatcatcaagaaactggtggccgcggaaaatgcgaaaaagccattgagcgacagcaagatcgctggtttactggaggcacagggcattcaagtggctcgccgcaccgtcgccaaataccgcgaatccctgggcatagccccttcgagcgagcgcaagcgactggtgtgacgttgatccacgccaaggtgttccggaggcaggttgctaacctgccacttacacacgggcaacaaggagaacgcggtatgcaagtcaacatcagtggccatcaactggatgtgaccgacgccctgcgcgactatgtcggcgagaaactgagccgtctggagcgccatttcgacaagatcaccaatgttcaggtgatcatggaggtcgagaaactgaagcagaagatcgaagccaccctgcgcatcgccggtggcgagatcgtagccaatgcggaacatgaggacatgtacgcggccatcgacctgctgatcgacaaactcgaccgtcaactgatcaaacacaaagagaagtatctcgaacggcagcaaggcgtaggcgcccgctgatctcccctcccctatgatccgacttgagcaaatcctgacccccggccgttccctcgtgaacgtgccgggcggcagcaagaaacgcgtactcgaacaaatcgccaacctggtagccagggagctgccggagttcgacgcccagaccatcttcgaaaacctggtggcccgggaaaaactcggctccaccggcttcggcaatggcatcgccattccgcactgccgcctgtctggctgccagagccccatcagcgccgtgctgcacctggatgctcccgtggacttcgacgcgctggacggcgcgccggtcgacctgctcttcgtcctgctggtaccggaggccgcgaccgaagaacatctcgaactgctccggcagatcgccgccatgctcgaccgtgccgacgtacgcgaccgcctgcgcagcgctcccactgccgaagcgctttatcagatcgtggtagacgtacagaacgggcaatgacatgcgcctgatcatcgtcagtggccgctcgggctcgggcaagagcaccgccctgaacgtcctcgaagacaacggcttctattgcatcgacaaccttcccgccagcctgcttcccgacctggcgcagcgcgccctgttgcacacggagctactacagccacaggtggcggtgtcgatcgacgcccgcaacctgcccagccagttgcagcgcttccccgaactgttgcaggaagtgcgggacaaccacatcaactgcgatgtgctgtatctcgacgccgacaacgagacgctgctcaaacgattctcggaaacccgccggcgccacccgctgaccaccgatacccgttcgctggcggaggcgattggcgacgagagccaattgctcggaccgatcgccgacctcgccgacctgaagctggacaccaccagcctcaacctctatcagttgcgcgacaccatcaaactgcgcctgttgaacaagccggaacccggcaccgcgttcctcgtcgaatcctttggcttcaagcgcggcatgccagtcgacgccgacctggtgttcgatgtgcgctgcctgccgaacccctactggaagcccgagttgcgcgatcattcggggctggagccggaagtccgcgagtatctggccgcccagccggacgtcgaggaaatgtaccaggacatcgtcggctacctgaacaaatggctgccgcgcttcgccgccagtaaccgctcatatgtaacagttgcgataggctgtaccggcgggcaccatcgttcggtctacctcgccgagcggattggcgctgcactcagggattccctgaagaacgtgcagattcgccaccgcgatctcagcagctagcccataacaagaaggacagactccccaagatgcccgccctcgagatcaccatcatcaacaagctcggtctgcacgcccgcgcggcggccaagttcgtcggcgtcgcggggcgctacccttgccaggtccgggtcggccgcaatcctgaaagctgcgtcgacggcaagagcatcatggccgtgatgatgctggctgccggcaagggcaccaacctgcacctgcataccgaaggcgaacaggaagacgaggcgttgaacgcgctggtcgaactgatcaacaaccgtttcgacgaaggcgagtagcctcttcccagagacaacgaaaaagccgccaactggcggcttttcctttccggcgattgcggccggcgtcaattcagcgcgggtcggatgagtcccctagcccagcgcggtatccagcaccatcatcaggcagaagccgaacaccaggcccagcgtagcctcggcggcatgtccctggcggtgggactcgggaatgatctcgtgggtgaccacgaagagcatcgctcccgccgcggcggccagcccccagggcaggagcagcgcggagaggccgaccagccaggcgcagagcaccgcgaacagcggctcgaccaggcccgacgcggcaccgaccagcatcgccttgaaacgcgacataccgactccggccagcaccagcgccaccaccagcccttccggcacatcctgcagagcgatgcccagggcgaggccgttggcctcgtccaggccggcaccggccgacacgccaaccgccatgccttcggggatgttgtgcaggacgatggccgtgacgaacagcaggatgcgcgggggaatgccaccggacagtggcgcgccctcgcaaccgggatggacgtccggcatcagccggccgaggatgaacagccccatcacgccgaccgccaggccgaaactgaccaggaaccccgcgccgaacttcgagtagccgaggtcgccggccgcggatagcgccggcatgatcagcgagaaggccgtcgccgagagcatcacgccggcaccgaagcccagcagcgcatccgacaggcgcgccggcatggtcttcaccaccagcaccggcatcgccccgagggcggtaccgaaggcgcagagcaggccgcctttcaacgccagcacgatgggcgccggcaggttgagttcggccagcaacagcgcgtggcggccgagcaggtagccgccgccgatgaagatcagcaggcccagcaggttgcgcagcgtccgcccgttaccttcggcgatgccatggagcaacgccttcatcgctgcaccgccaggctgccggccagccatctcgcatcacgggtagcattaggccagggcttgcgcatagcgacgcgcgacctcccaccagtcgatcacgttgtagaaagcgccgatgtattccgggcggcggttctggtatttcaggtaataggcgtgctcccatacgtccaggccgaggatcggcgtattgccgttcatcagcgggctgtcctggttgccgctgctctccaccagcaagctgccctggggagtcacgctgagccaggcccagccgctgccgaagcgggtcagcgcggccttggtgaacgcatccttgaacgcctcgaagcccccgagctgctcatcgatggcccgccccaggtcgccatcgggacggccaccgccctggggcgacatcacggtccagaacagcgagtggttggcatgcccaccgccattgttgacaaccggggtgcgcagcttctccggcagaccagccagttgccgcagcaggctttccaccggctgctcggcatagagcgtgccttccagcgcggcgttcaggttgttcacataggtctggtggtgcttgctgtggtggatctccatggtcagcgcatcgatgtgtggttccagggcatcgtaggcgtagggcaagggcggcaaggcgtggggcatggaaactctccgtcagtgatagcgaagtgaggggggcggagcgaggaactcgggtcggacctccgcgttcggcggtcccttgagcaggcgctcggtgcgcggataggcaccgtgttcgccgatgaacgacagcagttcgacataggtgcgccggctgtgatgctgggccgcctggcgcagggccaacggcagcttctggtcggcgctgacccgcaacaggcgctcgtggcaggcgcagaggtattcggcggtttcctccggttgctccagttgcaggtgcaagtcggccaggttgtgatgggaaatcacgaacgccatcaccgcctcgtcggcgtcgccccagcgttccagcagcacctgggccagggccagggcatggaggtagtgctcacgcgcatcgatcaatgcgccggtgacgaaacagcggttgccctgttcgatcgttcgttgccaatgacgcatggcggtacctccagtggtggggcggcctcagaggccgccagccgtgagtttttccggatccagcaacacctccaggcgcgcacggtccagatcggtgttttccagcgccacatcgatgatcggccgtccctcgcgataggcctgcttggcgatttccgcagccttctggtagccgatgatcgggttcagcgcagtgaccaggatcgggttgcgcgccaacgcctcgctgagcttgccttggttgaccttgaagctggcgatggccttgtccgccagcagccggctgacgttggccagcaactggatgctgtgcaacaggttgtccgccaccagcggcagcatcacgttcagttcgaagttgcccgattggccggcgacggcaatggcggcgtcattgccgatcacctgggcggcgaccatcgcggtggcctccgggatcaccgggttgaccttgccgggcatgatcgaggagcctggttgcagcgcttccagctcgatctcgccgagcccggcaagcggcccggagttcatccagcgcaggtcgttggccagcttcatcagggtcacggccagggtcttcaactggccggacgcagcgaccgccgtgtcctgcgaaccgatcagggcgaagaagtcgtcgccggggcggaacgccaacccggtcaggtcgttcagctcctggctgaaacgttcggcgaaccgcggatgggcgttgatcccggtgcccaccgcggtgccgccctgtgccaactgctgcaaggcaggaagtacgctctcgatgtgcacgccggcctgtcgcacctgctgcgcccagccaccgagcacctggctcatgcgtaccggcatcgcatccatcaggtgggtgcggccggtcttcacataggcatgcacttcgccggccttgctctggatagtctgctccaggtggcgcagcgccggcagcaggcattcgctgatctcgagggcggcactgatgtggatggtcgaggggatgatgtcgttactgctctgcccgcagttcacatggtcgttcggattgaccttgccgcccaggcgacgactggccagggtcgccaccacttcgttggcgttcatgttggaactggtgccggagccggtctggaacacatccaccgggaaatgctgcatgaagtcctcctgcagcaactgcaggcaggtctcggcgatcgcctcgcccatcggtgcatccagttgctgcagggagacgttcgcccgcgccgccgcggccttggccagcagcagggcgcggacgaaggcctggggcatgcgctggccgctgaccgggaagttgttcaccgcgcgctgggtctgggcgccgtagagggcggtcgccgggaccgccagttcgcccatgctgtcgcgttcgatgcgggtgtcagtcatcttggtttccttgttgcgggtgatcgaagctcatcgacggcgccaggtcctgcctggccattcgtacggagagctggcgcagccgtcgccgctggctgccgttggtggtcaatcgctgaagttcgcagaggggccggtaggcgtagtcgaggcagaggctgcgccagtgccagggcaatatcggatcgcgaccggtatcgagcaggaggttgtaggctttctcgaacagcggccaggcggccacaccttcccaaccggcgagatagcgcgcctcgccgaggtactggtcgagcaggcgcggttcgtcgggatcgagcgcgcagcggatctgcgtgcccagccagtaccagtgatccaatgcttgcgggtcgtgcgcctcgaaggacatggcaacctcaccagacgataatgagattgattattgttttcttcttggcaaaagacaagcatggtccccatagaggcggacaatcgaacaggcggaaacgaaaacgccagcgacgagcgctggcgttctacagagggaaacccggcctcagcgcccggccaccatcatcgactcgaccagtacagaaccggtatgcaggttgccgcgccgttcgatgtccttgccgaccgcgacgatacggcggaacaggtcgcgcaggttggcggcgatggtgacttcctggaccgggaactggatctcgccgttctcgacccagtagccggcggcgccgcgggaataatcgccggtcaccaggttgacgccctgccccatcaactcggtgaccagcaggccacgccccatccggcgtatgagagcggcctggtcctcgtcgccatggctgacgaacaggttatgcacgccgccggcgttggccgtgctcggcaagccgagcttgcgcccggaataggtgcccaggacataggacaccagctcgccgttctcgacgaatggcttggcgtaggtggccaggccgtcgctatcgaagctggcgctgccgagcgcgccgaccaggtgcggccgctcgtcgatgctcaaccattcgggaaacaggcgctggcccagcgcgccttcgaggaaggatgacttacgatacaggctgccgcctgagatcgccccgaggaaatggccgaacaggccaacagcgatttccggagcgaacagcaccggcacttcggcggtctgcaccggccgcgcgcccagtcggctggcggcgcgctcggcggcgcgccggccgatcgactcggcgctggccaaggcctcgccacggcggttgacgtcataccaatagtcacgctgcatctgtccttcgccctcggcgatcatcacgcagctgaggctgtgccgggtgctggcgtaaccaccgatgaaaccgtggctgttaccgtatacccggcagccctggtgggtattcagggtggtgccgtcggccttggtcacccgcttgtcggcggcgaacgccgctgcctcgcaagccagggcacgttccacggcctgctcgggactcaggctccatggatgatagaggtccagctcgggcaactcgcgggccatcaacgcggcatcggcgagaccggcgcattcgtcctcggaggtatggcgggcgatcgccagcgccgccgccaccgtctcgcggatggccgcctcgccggtcgccgaggtgctcgccgagcccttgcgctggcctgcgtagagggtgatgccgaaaccttggtcacggttgaactcgacggtttccacctcgccctggcgcacgctggtggacaggccctgctccagcgacaccgccacttcgcaggcactggcgccctggcggcgggcctcggcgatgatctgctcgacctgctcgcgaagatccggaagcacggagggaccgactgccgcggcatgtagactcatctgttgactctcctgttgacgtggccgcccacgcggccgggccggacaagcggcccctgactcgttatcatggcggcgttttccactggaccaccaccatggctgaatttcacgacgacgactcgcaattcgaagagaagagcaagtcgcagatcaaacgcgagctgcatgccctgcaggacctcggcgagcgcctgaccaccctgcaaccgcagttgctggagcgcctgccgctcaccgacccactacgcaaggcgctgctcgaggcgccgaagcacaaggcgcacatcgcccgcaaacggcatatccagtacatcggcaaactgatgcgcgaccaggacgtggacgccatcgtcgccctcatcgaccaggtggactcctccacccgccagtacaacgaacgtttccatgccctcgaacgttggcgcgaccagttgatcgccggcggcgacgcagcgctcgacgccttcgtcggggagttccccgagtgcgatcgccagcacctgcgcggcctggtccgccacgcccagcacgaggccgcgcacaacaaaccgccggccgccgcacgcaaagtgttcaagtacatccgcgaactggacgaaaccaagcgcggcctgcgctaggtttcgccgcgccggcgcccgggccatgcctcaggcgccggtgccgccgacggtgatcgcatcgatcttcagggtcggctggccgacgccgaccggcaccgactgaccgtccttcccgcaggttcccacgccactgtccagggccaggtcgttgccgaccatggacacccggctcatcgcttccggaccgttgccgatcagggtggcgcctttcaccggggtggtgatcctgccgttctcgatcaggtaggcctcgctggtggagaacacgaacttgccgctggtgatatcgacctggccaccgccgagattggcgcagtagatacccttctccaccgaggcgatgatttcctgcggatcgctctcgccggccagcatgtaggtgttggtcatgcgtggcatcggcaggtgcgcgtaggactcgcggcggccgttaccggtgcgcgccacgcccatcaggcgggcgttgagcttgtcctgcatgtagcccttgagcacgccgttctcgatcagcacgttgcagttgctcggcgtgccttcgtcatccacgctcagcgagccgcgacgcccagccagggtgccgtcgtcgacgatggtgcacaggctcgaggcgaccttttcgccgatccggccgctgtaggcggagctgcccttgcggttgaagtcgccctccaggccgtggccgaccgcttcgtggagcaggaccccggaccaacccgcgcccatcaccaccggcagggtgccggccggcgcgggaatcgcctcgaggttgaccagcgcctggcgcagggcctcgcgggcgtagcccatggcacgatcttcctggaggaaatagcgatagtcggtgcgaccgccgccgccgtggccgccgcgttcgcgtcggccgttctgttcgacgatcacgctgacgttgaaacgcaccagcggacgaatgtcggcggccagcgaaccgtcgctggccgctaccaggatctgctcccagacgccggccatgctcaccgtgacctgctggatgcggggatcgagcgcacgggtagcggcgtcgatctgcttcagcaactcgaccttctcggcacggctgagcacgtccagcgggttctcgccggcgtacaggcgagccggcaccaaggccttgaacgcctgcacactgccgttctgtcccgcacgggaaatcgaacgggccgccaccgcggcctgtttcaacgcctcggcggtgatcgcattgctataggcgaagccggtcttctcgcccgactgcgcgcgtaccccgacgccctggtcgagattgaagctgccttccttgacgatgccgtcctcgagcatccacgactcggagacctggctctggaaatacaggtcggcggcatcgatgcccgggccgttcagttcatgaagaatgccgggcaggctgtccagctccagaccaccgggggccagcaactgctggctgacggatgacaacaactcgctcatattcactccgtacgcgccggccgcggttcggccggcgggaaaaatcgtctgtgcgccaccaccggcatgcgccggcggatatccgcctgttctgcggcgtcgcgcgccgccagcagcaccgcttcgccctgcggccgctcgaccaggacccggccccagggatcgacgatggccgaatggccgaacgtctcccggccccgtgggtggacgccaccctgtccggccgccagcaggtagcactgggtctcgatggcgcgggcgcggaccagcacctgccagtgcgccgcgccggtcaccgcggtgaacgccgacggcgctgtgatcagctctgcgccggcctcgcgcagcgcggtatagagttccggaaaacgcaggtcgtagcagaccgtcaggccaaggcgaccgaccggcgtatccgccaccacgatcttctgaccgaaagcatagtcgtcggattcacgatagcggccccgcgcatcggctacgtccacatcgaacaggtgcagcttgtcgtagcgggcgacccgctctccgtgctcgtcaatcagcagcgaacaggcattcgccttcgcctcgggttgcccctccggcggcagcggcagcgttccggcgactatccacaacctgaggtcgcgagcggcggaattcaaccacggcaggataggcccgttcccccgcgcctcggcgcgccccagctcggccaggtcgcgccggcccatggcggcgaagttttccggtagcacggcgagccgcgccccgccctcggcggcctgttccagcaggcgacgggcggcggccaggttggccgtcacgtcgtcctggctgaccatctggatcacggcaatggacatggtttcctccttgcggacgaaagcgccgcgtcgcggcaccgggcgccgctcagcggggcttctcgaatggcttgtcgaagctgatcttcggatcctgccaggggcccttgacgctgtattgcacgctggcgaagcgcgagacccggtcgccgagcaacttgtcgacgacgaagaccgcgccgccgaccgccggaccgccgactatcagtgccgccagggtcaggttgttggtcaatggcaaggtcaccagcagcttggcgtcgatccgatcgtgagccaggtccagggtaccgttcaactccaggttgctcgacggtccttccagcttcagcggctcgcgggtgacgtagacgccgtcggtggcggagagaacccccttcacccggtcatagctcagtcccttgccgaggatgtccgagaaatccaggcgcagccggcggttgatcgcgttgaaattgagcaggccaaacactcgcagcgcctgggcgctgccttcgacctcgacgaactgccccttgcgcagcgatgcatccatgctgccgctgaagcgcttcagggccatgtaggccggcgatcccggccactggccgttgatatccatgcggaaacgttcgctggtggcactcggcgcgaaattccaggccttgagcacatccgccaggttcttgccctcgatccggccctgataggtgctgcgggtattgcccggactgccgtcccaacgcaggctgccgttgacgtgcaggccacgcaggtcgaggtccaggtcgttgaacgccacgccgttgctgcccggccgtaccttcaggctccaggcgcccagcggctggccgccgagggcgacctggccgatcttcacgtctaccgccggcaggctgcgcggatcgacggcggccagcgggtccgagtcctccaccttgttctcgtcgggaagggtcgacttcggtaggttcaggcggtccagatcgaccacgatcggcgcgcccctggcatccggcaggaccaggcgccccgatgcgaggtcgctgaccagcaccagttgccaggcccgctcctggcgggccaggtcgacggtcaggttcttcagctcctggccgaagccattgaagctgtcgatgcgcaggtcggcgccgcgcagcaggcccgcagcgctactggcggcctggtcgccgttgccgtagcgcttcagggtggcctgccaggcgtcccagtccagttccgccagacgcccgcgcacccgcagcccctgtgccgagggcagcaacgccgggtcaccgcccaggcgcagggcgccgcgtccgttcagcggcttgtccgccggggccgcataggccaagctggcgaggccgtcgtaacgcgcccagtaacgccgttcggcgccatccagggtcatccgccattgggtcggccgcgcctgggcggccgtcttgccgaacggcgccggcaggtcgacgacggcgcccttgagatccgaatcgatctgcaactggctgtccttgccatccagcagcaggttgagctggaacggcaggcgtcccgagaccggcaacggacgctggccagcgccgagccagtcgctcagcgacttgaccgccacctggccgttgagcagcaagcgcgtgcgcgcatcgccgcgcccctcggcgacgatccgcccgcgtacctcgctgcccagcacccgggcctgcaccgccggggcgctcaggcccttggccaggtcgaaacggaagtcgcccttcacttcgctcatatccagcttcggactgggcatcttcagggtcgcgcccacggtggagaaatccacgaccaccccggtcttgccggcctcgtcgtggtccagcggaatatccagcgtcaggtggccctgcaagggcccatcgccctcccagccggcgaagatcttgcgggtcgggatcggcgcttcctggagcagcttgatgccgtccttcaggttactgtcgacggccccatccacatacaggtgcggcgtctgtcccggacggccgaggggaatgtcgaccttgacgtcgctgacccgggaattcagcagattcccgctggaggccagcacgcggactccggaatcctcgacgaacacctcgccgaccgttttgctcaaggcgggccagccgggctggtaggccagctcgccgtcgcggaccttgaagtagaggttcatgacgtgggcttcggccgccgcgccgcggttcagcgagccctgccactggaagtagccctgctcgacatggccactgcggatcgccgtcttcaaccagttcgccaggcttttgttcattcccggcaactgggtcggcaggtacttggcggtgaagcgcgcgtcgccgtcgctgaggccgacctgcaggtccatgtagtcttcagcgccgggatcgcgcatcaggcggatcagcatgtcgccggccaggcggccctcctcgccctcgacccgcatcaggtggctgccgagggtgaaggcgcggtcgtccaggctccagaacatccgcgtgcgggcctcgcggtagcgccacggctcgggaaacaccttggccaggtgcagcatgaaatcctgcgccgatgcgtcgagctggcctccagccagggtgccggtcaaggtgccgctgacattttccactgccggaacctcatggaacgccgagataccgaccttttccaggttggttgcgtagctgacccgctcgggcacctctcgctgcggccagaaatcggcgttcaggttgtgcaggatgcccttcggcttcaggcccgccacccactccgccgccgcgtccggcagcggcgccagcgcttctatcgccggcaccaggggcgtcaggtcgacgcggtcggcctgcagcttccagtgtggctcgttgttctgctggtcgcgacgcaacagcaactccacctcgccccagcgctgctcgccgaaattcgccgccaggtcgccgacccgaaccttccagccctgcgcttcgcgatcgaagaacaggttcatgcccaggtcgttgatttccaccggcttgcgcgcggcatacgacgccttcaactgcggcgccagcagccgtgccaccagccgttgcgccttgccgtcgcgccagtcgaaccagaagtcgccgccggccttggcccggacgatcgtccattcctgggtcagaccggccggcaaccattgcgcccagtcgctctgcggcaggctgagatagaacctggcgctgctgcgcggccagtcctcgctgtcgatccgcccttcggcgtgcagcgccaggggttggccatccggcagttgcaggcgggcatcgagactctgcccaccaaccgatgaactgcgcagggtcacgccgaccgcgctgagcgataacactgcgcttccccgcggcgccacctccagttgactgtccagcagcgagatgcgttgggtctgcagcaggaattgcaggagtttccggggatcgctgggcttgtcactgtgcggcaggccatccaggctccactggccatcctcgccttcgcgcagggtcagcttgagtccctccagctccaggctgccgatccgcacctggcgcgccagcaggctgccgagcaggtccggcgccagccgcacccgcgccaggcgcagactctgttcgccgtcgccgacctggatgtcgcgcgccaccaccagaggctcgaagccgcgccaggagcccgtcagctcggcaatccgcaccggtatgccgagttgcttgccagcttcgtcctccagctgctggcggtattcggccaccagcggcaccagttgccggccaaggctgacgtacagcgccagcagcaccagtaccagggcgcacagacccaggacgatccgtagcagtcgcgttccgaggcttcccacatccgccatttcagccatacgcctcagagcaggaccacgtcatattgctcctgcgagtacatcgcctcgacctggaacttgatggtgcggccgatgaacgcctcgagatcggcgacgttacccgactcctcgtcgagcagccggtccaccaccttctggttggccagcaccaggtaggagtcggcctggtaggcacgcgcctcgcggagaatctcgcggaaaatctcgtagcaggtggtttccgcagtcttcagcatgccgcgtccctggcagcaggggcacggctcgcagaggatctgcaccaggctttcgcgggtgcgcttgcgggtcatctgcaccaggcccaactcggtgatgccgatgatgttggtcttcgcgtggtcgcgctccagttgcttctccagggtgcgcaggacctgccggcgatgctcctcgtcctccatgtcgatgaagtcgatgatgatgatcccgcccaggttgcgcaggcgcagctggcgggcgatcgcggtggccgcctcgaggttggtcttgaagatggtttcctcgaggttgcgatggccgacgaaggcgccggtgttcacgtcgatggtggtcatcgcctcggtcggatcgacgatcaggtagccgccggacttcagcagtaccttgcgctccagggctttctggatttcgtcctcgacgccgtagagatcgaagatcggtcgctcgcccgggtagtgttcgaggcgatcggaaatctccggcatcaattcttcgacgaaggaagtgatcttctggaagttctctcgcgagtcgatgcggatcttctcgatccgcgggttcaccaggtcgcgcagggtacggatcgccagggacaggtcttcgtaaatcaccgaaggcgcgccgacggtctggatctgcgcggcgatctggtcccatagccggcgaaggtagcggatgtcggcgagaatctcgtcctcgcccgcaccttccgcagcggtgcgcagaatgaagccgccctgcccctcgatgccttccgccgccacgcagtcggccaccaccttcttcaggcgctcgcgctcgacttcgtcctcgatccgcagggatatcccgacatggctggtgcgcggcatgtacaccagatagcgcgaaggaatcgacaggtgggtggtcagccgtgcgcccttggtgccgatcggatccttggtcacctgcaccaccagcgcctgcccctcatggaccagggcactgatgctttccacggcactgccttcgcgattggatatctcggcggcatggatgaacgccgcacgttccaggccgatgtcgacgaacgccgcctgcatccccggcagtacccgtaccacccgccccttgtagatattgccgacgatgccgcgccgctgggtgcgttcgacatgcacttcctgcaggacgccgttttccaccaccgccacgcgcgactccatcggcgtgatattgatcaggatctcttcgctcatgcgtccactgtccttatttcggcgcgttaggcgttacggcgggttgccacccacgggctgccagcaagggatgccgaattccctcaacagttccgcagtttcacacaaaggcagcccgaccaccgcactgtaactgccttcgatgcggctgacgaatatcgctccgaggccctggatcgcatatccgcccgccttgtccgccggctcgccgctctgccagtagcgcagcgcttcttccggggcgacctggcggaagcgcacccggcactccactacccgcgcctcgacgccgccagcggcggccagggccacggcggtgagaacctggtgttcgcgcccggacagcgcagccagcatggccagcccctcggcctggtccacgggcttgccgagaattcgcccgtcgatcaccaccgaggtatccgcgcccaggacacaaccgtcctcgccgcgcccttccagcatagccagcccggcggccgccttgccgcgcgccaggcgctcgacgtaggcggcgggcgcttcgttcggcaagggggactcgtcgatagcggtggcgagcacggacagcggaacgccgatctgggtcaacagttcacggcgacggggcgaggcggaggcgagatacagcgacggcatggaggctcccgggaaacgcgtcgggcgatgcgccgatcacccgtttcgaagaatgacgtatccgccgcagcatagctgcgaagcggacctacctcacgttgagacgcaggcggacgaactgcagcagggcgtacacccagggccagagcagcgcgctgaccagggccggaagcaggaaggtcagggtcggcgggcgattgccggtcagggcgttgagccagagctggagcagttgcgccaggccgtagaccaccaccagcaccaggcactgctgccaggccgggaacatgcgcaggcgctggtgcagggacagcacgaggaaggtgatcaggccgaggatcagcgcgttctgcccgagcaggttgccgtagagcacgtcctgggccaggccgagcagccaggcggtgaccatcccgacgcgctcgggcagcagcaacacccagtaggtcagcagcatcgccagccacagcgggcggccgatctcggtgaaggtaggcatcggcgctacggccagcaccagcccgaccagcaggctcagccagatcacccagatattgttcgaaccctgggtcgcgcgagccatcagcggcgccccccgttggccgccggagaggcaggctgcgtgggagctggcgcgggcgcggcggcgggctgctgcgcagcgccctgggctgccggggtggccggcgacggcgcggcggccggttgcgcggcaggctggggcgcctgggcgccggcagcggctttcttgtccgcctcttcctgggcctcggcggcgtcgttggcgcgctgttccggggtgcgactgtcgctgaacaccagcagcacgtagcggctacggttcatcttcgcggtcggcaccgcgcgcaccacggcgaacggctggccggaatcgtggatcacttccttgaccgtggccaccggatagccggcggggaagcgttgccccaggccggagctgaccagtaggtcgccttccttgatgtcggcggtgtcggcgacgtagcgcaattccagacgctcgggattgccggtaccgacggcgatggcgcgcaggccgttgcgattgacctgcaccgggatactgtgggtggtgtcggtgagcagcaggacccgcgcggtatagggcatcacctcgaccacctggcccatcaggccgctggcatcgagcaccggctggccgacgaagacgccgtcgttctcgcccttgtcgatcatgatgcgttgggtgaaggggttcggatcgacgccgatcagctcgctgaccagtaccttgtcgtcgaccagcgcggcggaattgagcagctcgcgcaggcgcacgttctgctcggtgagcgcggcgagtttctgcacccggcgctgcatcagcagggactcggccttgaggcgttcgttctcggcgatcagctcgctacggctgctgaactggtcgcgcacgccttcccaggcgcgcaccggcatttccgccaggccgtagaaaggcgtgagcaccatccccagcttgctacggacgggctccagatagtcgaaccgggcgtccaccaccatcaggctgaccgacagcacggccagcaccaacaggcgaacgcccagcgacgggcctttggagaatagcggtttgatgatccgctcctaggcgacgatgctcgccaccttactcggtggagagcaggtccatggagtggcggtccatcatctccagcgcacggccaccgccgcgagccacgcaggtcagcggctcctcggcgacgatcaccggcaggccggtttcctgtgccagcagcttgtccaggtcgcgcagcagcgcgccaccgccggtcaacaccaggccgcgctcggcgatatccgaggccagctccggcggcgattgctcgagggcgctcttgaccgcctggacgatggtcgccagggactcctgcagggcctcgaggacctcgttggagttcagggtgaagctgcgcggtacgccttcggccaggttgcggccgcggacgtcgacttcgcgaacgtcgccgcccgggaaggcggtgccgatctcctgcttgatgcgctcggcggtggattcgccgatcaggctgccgtagttgcggcgcacgtaggtgacgatggcttcgtcgaagcggtcgccgccgacgcggacggattcggcgtagacaacaccgttgagggaaatcagggcgatctcggtagtgccgccgccgatgtctacgaccatcgagccgcgggcctcctcgaccggcaggccggcgccgatggcggcagccatcggctcttcgatcaggaacacctcgcgggcgccggcgcccagggcggattcgcggatggcccggcgctcaacctgggtggacttgcacggcacgcagatcagcacgcgtgggctgggctgcaggaagctgttctcgtggaccttgttgatgaagtactgcagcatcttctcgcagacgctgaaatccgcgatcacgccgtctttcatcggacggatggcggcgatgttgcccggggtacggccgagcatgcgcttggcctcggtgcccacggcgacgacgctcttctggctgccatggctgcgaatggcgaccacggacggttcgttcaggacgatgccgcgctcgcgcacataaataagggtattggcagtacccaggtcgatcgacagatcgctggaaaacatgccacgcaattttttgaacatgggaaagaaaccctaggcgaagcgtgggtgaaaaatacgcgggtaaaaaagtgcggcaaactctaacaacgacggggattttgggcaaggcgggcaatatgctaaattgcaggcttttcccggccccacaaggcccgtccaggcggaattagaccgccgaccgcggcatccgttccctgccttatataacgcatggcgccccgccgcccttccaaggccgcttttgctggagactcccgatggcgcttgaacgctccgacgtggaaaaaatcgcccatctcgcccgcctgggcctgagcgaggccgatcttccgcgcaccaccgagaccctgaacaacatcctcggcctgatcgaccagatgcaggcggtcgacaccagcggcgtcgaaccgctcgcccatccgctggaagccacccagcgcctgcgcccggacgcggtcaccgagaccgatcaccgcgacgcctaccagaccatcgcccccgccgtggaagaaggtctgtacctggttccgaaagtcatcgagtcataaggacgcggacacatgctgcatcaattgaccctcgccgagatcgcccgcgccctcgccgacaagcaattttccgccgaagagctgacccgcaccctgctcggtcgcatccggcagctggatccccagctcaacagtttcatcagcatcaccgacgacctggccattgcccaggccaaggcagccgacgaacggcgcgccaacggcgagaacggcgccctgctcggcgcgccgatcgcccacaaggacctgttctgcacccagggcgtacgcaccagctgcggttcgaagatgctcgacaacttcgtctcgccctacgacgccaccgtggtcgagaagctcaccgccgccggcgccgttaccctcggcaagctgaacatggatgaattcgccatgggctcgtcgaaccagtccagccactacggcgcggtgaagaacccctggagcctcgaccgcgtgccgggcggctcctccggcggttccgccgcggcagtcgccgcgcgcctgctgccggccgccaccggcaccgatactggcggctcgatccgccaaccggcggcgctgaccaacctcaccgggatcaagccaacctacggccgggtttcccgctggggcatgatcgcctacgcctccagcctcgaccagggcggcccgctggcgcgcaccgccgaggactgcgcgctgatgctgggggtgatggccggattcgatccgaaggactcgaccagcgtcgaacagccggtggacgactacctggccgccctgcagaagccgctgagcggcctgcgcatcggcctgccgcgggaatacttcagcgccggcctcgacagccgcatcgccgacgcggtgctggccgtagtcgaggagctgaagacgctcggcgccacggtgaaggacatttccctgccgaacatgcagcacgccatcccagcctactacgtgatcgcgccggccgaggcgtcctccaacctgtcgcgcttcgacggcgtgcgctatggctatcgttgcgacgccccgcagaacctggaagacctgtacaagcgctcgcgcgcggaaggcttcggcagcgaagtgaagaaccgcatcatggtcggcacctacgcactctcggccggctactacgatgcctattacctgcaggctcagaagattcgccggctgatcaagaacgacttcgtcagcgcctttgccgaagtggacgtgatcctcggcccgaccacgccgaacccggcctggaagatcggcgagaagaacgacgacccggtttcccagtacctggaagacatctacaccatcaccgccaacctcgccggcctgccggggctgtccatgcccgccggcttcgtcgacggcctgccggtgggtgtccagttgctcgcgccctacttccaggaaggccgcctgctcaacgtcgcgcaccagtaccagcaggtcagcgactggcacacccgcaccccggccggcttctaagccatggcaacgccacgcagtcccctcccctctcccggcgcggagagggcgacccgcagggtcggcagcgggactgcgcaggcacagaaggattgaggaacaccacatgcaatgggaaaccgtgatcgggctggaaatccacgcacagctcgccacccaatcgaagatcttctccggcagctcgaccgccttcggcgccgcgccgaatacccaagccagcctggtcgacctggccatgccgggcaccctgccggtgctcaacgaggaggccgtacgcatggcctgcctgttcggcctggcgatcgacgcacggatcgaccggcagaacgtgttcgcccgcaagaactacttctaccccgacctgccgaagggctaccagaccagccagatggaccatcccatcgtcggcaagggccatctcgacatcaccctggaagacggcaccaccaagcgcatcggcatcacccgcgcgcacctggaggaggacgccggcaagagcctgcacgaagacttccagggcatgagcggcatcgacctgaaccgcgccggcacgccgttgctggagatcgtttccgagccggacatccgcagcgccaaggaagccgtggcctacgtcaaggcgatccacgccctggtgcgctacctgggcatctgcgacggcaacatggccgagggctcgctgcgctgcgactgcaacgtctcggtacgaccgaagggccaggccgaattcggcacccgcgccgagatcaagaacgtcaactccttccgcttcatcgagaaggcgatcaaccatgagatccagcgccagatcgagctgatcgaggacggcggcaaggtagtccaggaaacccgcctgtacgacccgaacaaggacgagacccgctccatgcgcggcaaggaagaagccaacgactaccgttacttcccctgtcccgacctgctgccggtggtcatcgagcccgagtacctggcgaagctgcgcgagcaactgccggaactgccggtgcagaagcgcgaacgcttcgagagccagtacggcctgtccgcctacgatgccagcgtgctgtccgccagccgcgagatggccgactacttcgagaaggtccagggcatctgcggcgacgccaagctggcggccaactgggtgatggtcgagctgggcagcctgctcaacaaggacggcctggagatcgagcagtctccggtgtccgccgagcaactgggcggcatgatcctgcgcatcaaggacaacaccatctccggcaagatcgccaagatggtcttcgaagccatggccaacggcgagggttccgccgaccagatcatcgaggccaagggcctgaagcaggtcaccgacagtggcgccatcgagaagatgctcgacgaggtgctggcggccaacgccgagcaggtcgagcagtaccgcgctgccgacgaggccaagcgcggcaagatgttcggcttcttcgtcggccaggcgatgaaggcctcgaaaggcaaggccaacccgcagcaggtgaacgagttgctgaagaaaaagctcgaagcgtgagtcaaagccagacgccgggttcgcccggcgtcttcttgtccgccaggagcctgttgtccatgcccaccccatccgccgccgcgcgcctcgccctcgccgtcctgcccctgttcctcgccggctgctccagcctcgccggcagcggttccgcggataccggcgaagcctcctactatggcagccgccacgcaggcctgcgtaccgccagcggcgagcgctacaaccccaacgcaatgaccgctgcccaccgcacgttgccgttcggtacccgcgtgcgggtaaccaacctcgacaaccgccgcagcgtggtggtgcggatcaacgatcgcgggccgttccgccgcggacggatcatcgatgtatcgcgcaaggccgccgaaggcctgggtatgatccgcagcggcgtggcgccggttcggatagagtcgctggattgagccaccttctacccacgacaggaaccttccgatgagcgaacaaggcaagaccggcctggagatccgacgtgaagtcatgggcgacgccttcgtcgagcgcgccatgggcaacgccaccgccttcacccagccattgcaggacttcgtcaacgagcatgcctggggctcggtctgggcccgcgaggcgctgccgcgcaagacccgcagcctgatcaccctggccgccctgaccgccctgaagtgcccgcaggaactcaaggggcacgtgcgcggtgcgctgaacaacggctgcacggtggaggaaatccgcgaggcactgctgcactgcgcggtctatgccggggtgccggcggcgatcgatgcgttccgtgcggcgcaggaagcgatcgatacctggcagggcgaacagcccgcctgagcccaggagccattcgcagcggcatgagcgccgccgtcaggccacgggttgataacaccgatgcctgagcgacggcgaataacgccaggggcgttatccgccctatgggaccgagcgcaggcgcctacggataactgaagcgcttcaccagcgtcagctcgccaggcttgcgcatcggcaccaggaaggtttcctgtttctcgttcggcgtgccctcttcggtgaccagggtgatgcgcgccgtggtcaggtcctgggcggcctgttcggcgccatcctcgctgctgccgtagccaccgccgaagtagttgacgtagaccaggtagggccccttctgcggcgtcggcgtggcgatgatttccgggccgtagccggtggtgacgtcgacatccagggtcgcgccgttggccagcgaacgattgccataccagacatggtcgccgtccggggtcaccaggtgcaggtcgaggtcggtgttgtcactgtcccaggacagcagcacgcgcagcttggccggcacttccccgccgccgccaccgtgatagaactggacccgtcgcgactgcccggcggcgttgcgcacctcgacgctgttgctgccggacgggaaggcgaacgggcggtcgaagctgccatcggcgtccaccttcagcggcatgctcacaccgttcaccaccagcgtcgccgggcggtccttgggctggctctcgatcgcgccgcgaatgcgcgcggtggtcgcctggtcggcggcgacgttgaccgaggacgccgggtagttcaccacctgccggtaattggcggcggaaccgtcgccggcacgccagccggagaccggcgtatccagtttcacggggttgtccgcccaggcgacgaggggaacgcaactgagcagggcggcaagggacattcggttcatggagtcattccagtagcaggcgccgggccaggctttcgacatagttttcgtcctggccgctgggatgggcgcggaaggccaggtgcaggtattcgtgggtgaggtccaggcgttcctgtagggaatacaggccgcggacgaagatgcgttcgcgctcgcgatcgacatagggccgcccggaagccaggcggcacacggaaaaactctgaatctcctcgtagccgggctctcggtcgaggcgctcgcgccactgccggcgctgcttgcgcagccagtcttcggcagccggcaacgactggcaggcggccaccgggttgtcccagcggctcaggctgctgcgcgggaaagcctgggcgaggatgctgtcgtagcccagtccctgcccggcttgctccaccgcgtgcttccaggacaggcgcgccggaccaggctggtcggagtgatagttgacggtcgccccggccagcaccaggtcggcgctccaggcagcgatccgccgcgtcggcgcgctggccgggcgcggcgccacgcgctggcgctggctgctgtcatcgatggccaggcattcgccgcgcggcgcggcgttttgcaatagataggtgcgaatggtcaccgccagcgcgcgagcggcttccttcggctgcgccgaggcttcgcgctccagcacccgcgccacgtactcttcgcgcgaaacccgcgcgaccagccgcggcacgccatccacccgttgcaggaagaggtcgccggcgctggcgatgtccagtcgattgccgttggcgaagagcacttgctgcggaccatgcagcaggccttcggcggccgggtggccggagggatcgctgaccgagcgcagcggatagcggctgaacaggttcacttccacgcaacggcccggatcggccggccacggactcggcaggaagcgcccgagcacctcggcgtagcggtccaggatcatcttgctggttcccgggccgccgagccagagcggcgttccatcgaccagccagccagcgaaaccgccctggcgcgcctgcgggtcatggtcgtcgagccagctccaggtcttcacccgcaggcggccgccaaggctggccacggcatggccgtcgccggcctgcaacgccacgtcgagcagtacccgccgcgcctcgccctgggccggcagttgctgcaactgctccagaagctccttaaccggcacccgcgtctgcggttgcagccgttccagatcgagcaaccaggccggtgcctggcgcgcctgccagtagccgcgccaggcctccggctgcaaggcgaggcgctgcggctcgaaatacagcccgcaggagcgcaccagggcgcggtcacgaccgatcgtctggccattctcgcagcagtagacctcctcgcggctgcgcccctggcaggtatagggcggctcggcctggccggtgtcgctcagccaggcgaagacgaacagtttccacaggctgcccagcggagcctgcaaatcggccggcaacggccggcgctcgagcacccgctggcgatccaggctcaccagttcgtagccctgggtcgtgcgccaggccagctggaccggcgcctccgctgcgcgaagcagcaacggcacggcgcacagcaggaccagccaggcgcgcaacgcaatcactcgaccttgaccttggccagcgccggcttggcttccagggcctgctgttccggcgcgtagagacgcaggtagcgggccggtggcaggttgaagctgcctttctgggagaaacgcaccaggtgacggaaacgctgctcgccactcaggctgtccaccggcaccccgtagaacaactcgcccggttcgttgcgcgcgcgctccagggtggtcgcttcgtcgccggccaggccgctgatcttgatgccccaggtggtgcgctcgacatccgcgccgggcggcagcggcagttccagcatgccgtagcgtagagcggtgtcttccggaacgttcagggtcacttcgtcgagatacagttcgtcgctggaaagcggcttgtcgccgacctcctcgaccttgaactcgaacgccccctcgccgggcaccaggcgcagcagacgacggctgatctgcaccggcagttgcccgctcggcgcctgggcgctgcggtagctgagcgcaaccggcaacggccgggccggcgcctcgtccaggtcgacccagctcggaatgccgcggccgcgccattgccagtaggtttcgccgctggcgccgcgctgcgcctgccagtccttcggcggctgcggcagcttgccctgcggcgcctgggccagggcgccctgcagccaggtcagggccagggcgcgttccagggtcgattgcgccggcgccaggcgttgcagcagagcgctggcctgctggccatccacggccgagcgagaggccagcaaggcatcggtgaacggcaagccggcctcacgcaggcgctgcgtcgccgtctcggcctgggcggccagcggcgcgggcaccgcgacccgcagttgccgtgcaaggtccaccgccagcactcgcgccgcggccaggccgacggccgagtccgggtcgcccagcaccaggccgtcgtcggcctccagcggctccgcgcgcgcctgcccttcgccggcgttggccagatcgttgagcaggccgccgagcagggtgttcaccggcaactgcatgtcgcgggcgaaagccaggatcagcgcacgctgcagcagcggggtctgcgtcgcctgcttggcgtagggctcgaggatgcgctgccagtgttcggccggcagttggatctccagtgcgcggctggcgtaccagtcggcgtagtaggcgtaggcggtgaggaaagcgtcgccatcgacgtcgccaccccaccaggcgaaccaggcgtccgggccggccatctgcaccaggcgcaggcgactgttctgcatgatcaggcgcaggcggtcgcgaatccgcggctcgccgccggccagcgccggataggcgatgctcagcggcagcagttggctggcggtctgctcgacgccgccgtagggatactccagcagatcatcgagattgcccaggtaggcagcggccgggccatcggccaggcgcaggcgtacgtcgcgcgcgtccgccggcagttgcagcgggttgctcgccgccgccaggctgaggttctgcacctgctccacctgccagccgtcggccagcaggttgaagcgcaccgccaggcggtcgcggacctgcccgtcctggcgcaactcggcgctccagtcgccatcgctgagcggctgttgcgccagcggaatgtagttgactcccttggccagctccagggtctggctgcgctggctgccaggcggcccgctgagcagctcggccttgaccggctgttcgccctggttgaagacgaacaggccgaggtcgggctggtcaccctggcggaagcgagtcggcccgctccacttcaggtacagcggcttctccgagcgaaggaactgcttcttctggccgacctggccgttgtcgtcgatggcccgcgcggtgatccgccagcgggtcagcgagtcgggcatgcggaagctgaagctggccttgccctgggcgtcggtgaccagctccggctgccaggcggcggtgtcgacgtcctcgcggcgcggccgctccagtaccttgacgccgcgctcgctgcggttcgcccgtccgggtgcgctggtgctgccgggcaacgccacgtcgtagctgatgaaggccaggctggcgctggtgcgcacgttgttgcgccgcggatggtagaagaactggtcgatgccgggggcgatctccgcctgcagggcatagaccatctcatccaccacgctgacggtcaggtggctggaaaccggtttgccggcgaagcgcgtggccagggtcacggtcaccgtctcgcccggttcgtagcgctccttgtcggtggcgatgtcgatctctacctggggcatgccgaccttgatcccggcgttctggaagctgtagtcgccgcccttggtgtagagcaccgagaaggtcaggttcggcgagaactcctcgcgcaccgggatccacacgcggtactgggtcggattgagcttttccaggcgcagccagtcggcgcccttggacagcagggcggtggcctcgaccttgtcgcgctccagggacaacagcgcatcctccaccggctcggggaaggtgatcagtgcggaggcttcctcgccggtgcggtactcgggcttgtcgaacaccacctcgacggtgcccggcaccgacttcacgccctcgccgctcaccgagtggccggtggcgccaaggagctggcccttgtcgtcgcgcagctccacggaataggtaccggggcgctcgaaggtcagcgcgaagcggccgtcggcgaccggaccgctgtcggtggcgcggtcctccaggcggatccactggtagctgctcggcttgagcggggtcggctgttcgctggcatagctgaactcgaccttctcgccggcggcgctgaagcgctgcggcgcgctcaggcggtagcgcgcggcgccgcgctcgatgaggatctccttgctggtcttgacccggtaggcggcgccgtcgctggcgaagatggtcagcatgtagcgactgggtttctcggccggcggcaattcgatggcggcgcggcccttgccgtcggtggtcagttcggtgctgctcagttccaccgggaactggccgagatactgcagttcgttgtccaccatcgacaactgctgggcgcgcaggctcagttgcaggcgcgcgttggccaccggcttgccgtccggatagagcaggacgatctcgcccttcaccggctcggcggtcttgaagtccggcttggccaggtcgagggcgacttcgaagtgcggcttgatgtattcggcgacgcggaaggcgctgctgtaggtctgcccgcggtagtcgaagcgcaactcgtagccgccggcgacggcgttctccggcagttggaagcggccattggcgccgctcttcgcgtcgaagcggaggtccaggctttgcaataccgtgccgctggcgtcgatcacgctcaggcgcaccggcgcgctggcggcggcctgggattgccgggcgtccttgaactcgcggccgaccatcttcaacgagacccagtcgcccggccggtacagcgggcggtcggtgaaggcgtagatcttggtgtcgtagatctcgctgtcgtaatagaagttctcggagacgaagaccccgccctcgcggtcctcgccgatcacgtaggagcgctccggactggcgtgcttgagccgcagcaggccgtcggcgtcggtattgccgctgctcatcacgcccaggccgtcggtccacagcaccttggtgtcgggcaccggggtgccttcgtgcttgcgtgcggtccagaccagcagctcgtcgccggcgaccttgctcaccgccacgctgttggagacgaacaccacggtggtggcgcggtacttgccgacaagcgcctcgaccaggtacaggcccggcttcagcttgcccagcgggatgtagacattgcccggcacgacgttgatgaactcgctggaggaaccggccagcttgacgtcctgcggcggctcgatgggcttggcgtcccacagcggatagcggaactggctgaccagcggcaggccgggaatcggcgcgtattgcggctgcgcgtcgtagggcgtcggcgcggtcatggcgttgcccatcttcagctcgggcaccgcctcggtgacctgttgccgcgactcgtaggagaaggcgcgctgcatcacccggcgcgacttgcgataccagttgtcccagagataggccagggtgttcgacaggccttcgcccttgaactgtccctcggccaggacccggtgcaggttcttctgccgcttgaggaactccagcggctgttcgatccggtacaggcgcacgtcgaccccgccatagggctccatgcggtagcgccggtagtcgcggccgggcgcttcgagacggacccgcgcttcctcgtcggtggcgaagctgctgtcggcgagcaggaagaaggattcgccggccatcggcgtgtagccgctcggttccaccgtgtcttccgcctggacggcggcgaacggcagcaggaccagggcggcgaccgccaggctacggctgaaacggcgcaggttgctcattgctgtggtcttcactgggacgcgattcattgagagaggaaagccagccgatagatgccgataaagttgggattggattcgtcggggatccatcgggtgtccttccatgtcatgagttgttgcaggctgaccgagcgcatgccgttatcggtcggggtgctgctgccggtgtgataggcgatggagcggcccatccagatcatcaggtgctggtcgtcgccctggtcgtagaacatcaggtcgccggggcgcgcctggttgaggtcgcgaccgaccagccggctgttgaactgcaccagcttgatcgcattcacgtagggcccgacctggccgccaccctgctgccagttctgcgccaggcgccgttgctcgggactgagcgccagctccgggggcaggtagcggttggacaggccgttggcgcgcagccacttgccatcgtggactttcagcgcctcgttggcggcgaagcgcaccaggccggcgcagtcctgctggtgccagcgcggactcggcccttggcgcaactgttcctgggcgatgcgcacgaaccaggcgcggaatacctgcgattgctgcgggtcgagcgttaccgcgggctcgccgcgggcaacgccgctggccagcaggagcagcgccaggccgaaggcagtcagacgtctcacagcgaccgccattccagcggcagccattgccacggtgcgttggcctggcttccggcaggcagcccgagggcgtagctgcccttgccggcgagggttttcaggcgcggtatcaggtaggtgtcggcggcattgcggaataccggctccatgtcctgcggcaggctgtcgagggtttcccgttgcagcagttcggagagcggctgcggcgccaggtaggccggtaccagcgcatccttcggcaacacctcggcgagcggcggatagcgtttgtcgagggtgtccagggccttgccgagcaactggtcgtcgagggagaacagcagggtctggccatggcgcgccatgccgatgcggaagaacgcgcggccgctgatgctctccgggttgtccgcctggctggccggataggcgccgaagttcgagctgacctggcgggtccagcggcgggtctggccgtccacccggtcttccaccgggaagctgccaccctcgaccttggcttccttcgcgccgatcacgcgaccgaacagcttgcccagctcgtcgtcgagttcggcactggccggcgcgctcaactggcccaccagcagcggcgaatgcagccgcgaactggcgtaccagcagagaccggcagcgccgctgagatgctcggagaaggcctgggccatcttctgctcggcccccagacgctccagcatcaccccgtacaggccaggggtgaccggcagcgccacgcaggcgctggcgcccatcggcatggcctgccagaccggggcgaagtccagcggcggctggcgttccacctcgttcagcgccaggtagctgctccagccctgctcgcccttctcgaagcgcatcccggcgaagctcgggatgaagcgctggtagcccatggccaggacgctggcattgagggtgatgcgctggcgcagctcgccgcggcccggcaggccgaagcgctcggggaacagttcgtcgccgtcgagcagtgcctccacgtcttcgctggccggagcgttcagcgggctgtcgtcgctttcgccaccatcgtcgaagagcatccgtgggttcgacagcaacaacagccggtcgcccttggacaggaacagcatcgccttgtcgttgccgtagcgcaggcgatagaccgaggttcccgccaactcgccgaccttgcgcaactgctggtcgtcggcggcgatatgggccagcggctcgagcacccgcgccaggccgccgcgcttgagcaccaccacgaagtcgcgcaggcggccgtcggcgccgcgccagagggcgacctgggccggttggtcgagcagttcctcgaccaggctgtccttcaaggtcaggtcgtgctcgtagatgatccgccgcaacataccggtcaggccgaggcggtcgccattgttctcgtaatagaagacgaagtcctcggtcagggtatcgcgcagcaacggcacctcgaggatttccttcggcaggcggctcagcgacacgctctcgatcagcgcgtcgggcttgcgcaggtcacggtaggcacgtggcgcgtcggcgtccgcgggtgcctgggcgccgatcggctggccgaggtcctcttcggccgggcgccctccgccgagccgctccagccagcccatctgccaggccagcacaccgccggcggccagcgcggcgacgatccccagcaccggccacagggcgcttcgggtgcgcgcagcggcgggcgcaggggttccgttggcagggctgggggtgttgttctcgctcatggttcgctaatcccgtgtcatccgtacgaggggatgcttcagtaggtaaaggtcttgaccagcaccaggtcgccgatggtgcgcaggggcacgacgaaggtctcgtgcttctcgtcgacgctgttttcgttgaacaccaggttgacctgcgcggtgatcacgtcctgtacgttgctgccggcctggaagttgtagccctggttgttgaggttgccccagtagttcacgtagatcaggtaggtgccgtgcagcggcgcgcccatggtgaacatctccgggccgggcccgtcgacgccgtccggatcgaggccgccgctgttgctcaggcgcggatgcgcccagtaggcgtgctggccatcgggggtgacgatatgcaggtcgagctcggccttcggatcgtcccaacccagcaccacgcgcacgcgcggcggcagttgggagcgattggcctcgtagaactgtacgcgcttgaggatcttgccgtcggcgctgccgacctggacgccgttggagccgtggccgaacgcataggggcggacgaagcgcccggcgccgtcggtatagagagggagaggattgccgttgaccaccaggcgctgggcgcgctcggtgccgaccagttcgcgcaggtgtccttcgatcaggctgcggccgcgctggccgccgcgatcgatgggcggagtcggataggcgacacgcggggcatcgggctgctcgagcaggccggaatagcgccagcctgccgtcggaccatccaggtccaccgaaggctcggctagtgcaggcagcccgaaggccagtccgaacagcaccgacaggcagccggcactcgaaccgaagatacgcatgatcaatccctggtcgtgcgattcatgaaagttgcatcttaacgattgcgctgtccgctggatatccccggcgaccggcggaatgtgcgaaatccaccgcgattcgacggaaagcggaaagtatagggggcgccatgcggcgcccccgttgtcatttacgcttcagcgccgtaccggccgcttctgcagcttgcgctgcaaggtccgtcgatgcatgcccagggcgcgggcggtggcggagatgttgccctcgtgctcggcgagcacgcgctggatgtgctcccattgcaggcgatccaccgacatcgggttttccggcaccagggtgtccaggtcggcgtgctcggagagcagcgcggccaacacgtcatcggcatccgccggcttgcacaggtagttgcaggcgccgcgcttgatcgcctccaccgcggtggcgatgctggaatagccggtgaggatcaccacccgcatgtccgcgtgcagctccagcagcttcggcagcagcaccaggccggagtcgccttccatcttcaggtcgagcacggcatagtccggcgtgtcctgctgggccagcgccaggccttcctcggcggagccggcggtgctgacccgcaggccgcgacggctcatggcccgggccaggacccgggtaaaggtgggatcgtcgtccaccagcaggagatggggttgttcttccccttcgaagagcagctcttcagacataggcagggcctctcagacggatcactcaagccattccgtagctgcgcggcaagcgcagttcggtcagagtgccgccatcttcgtggttatacaacttcaccgttccaccagcgcgggtcacgctggcctgactgagaaacaggccgaggccgaagcccttgcccttggtggtgaagaacggtttgccgatctgttcggcgatcgccaggggcaccccgacgccgtggtcgcggatactcaggcagatactgctgctgtcccagtccaggcggatgtcgaggtcgtcgggacaggcgtccgccgcattgttcagcaggttcagcagagcctggctgaggtcggtcggcggggtcaggcgcggcgcggagccgaggcccaggcactggtagcggtaggaagcctccggacgcatcaggtgccagcggcgcagcaccgattccagccattccgcggcgctttgctcctcgatcgcctgacgacggtcggcctcggccgcccgtaccagttgctggagggtgtgcttgcactgcttgacctgttcctggagcaatgccaggtcttcctgcagggtcgggtcctgcgggcgctcctggcgcagctcgttgagcagcacgctcatggtcgccagcggcgtacccagttcgtgcgcggcaccggccgcctgggtggccaccgcgagcaactgctggtcgcgcatgctttcctcgcgccgctcggcctgcatgtgcgcctgccagcgcagcgcctcggacatcttcaccacgaagaaggtgatgaaggccgccgacagggcgaagttcagccacatgccgaacaggtgcaggttgatcagcatcgcctcgtgctgaaccgcctgcaggtgcagcgggtggtaccagatcagcagcagggtgtagccggtcagggccaggccggagagcaccatggagtagatccagggcagggtcgcagcggcgatggtcagcggtaccaggtaataggagacgaaggggttggtcgagccgcccgagtaatacagcaaggtgctgtggatgatcaggtcgcaggccagttgtaccgcgtactcctggtcggtcaccggccacggcgcgcgcaggcgcagcgcggtgaacagaatcaggcaggcggacaggccaagggtcaggccgagcgccagccacggcagcggcaacaggtcggagagccaggcgaaacccaccgagccggcctgcgcggccagcacgagaatacggatgaggagcagacggccaaggttctggcgactggcggagagcaggaaaaccggtgcgcgcatgttttcttccggaataagcgcgagtatagccaagacgctgtcggcaactctgcggcaaagtgactcagaaacctcgcaggtcgccatcctgccctgtttcgccgagcgctgtcagggctcagatcagtaaatttcacgttttttccgaaatcgcctaacccgttccgggaaaagccttcgtctcatggtccaagactggcgtataggcgtgtttgccgcgcctgccggaacgatgctctacagtgtgaattcagccttagtacaaggagttgcccaatgtctgcgatttcccgcctggccgccgccgtcaccctctgcgccgccagcctctcggccgtcgccgaggaagcgccgcgctacaaccaggtctcgctgcacgccgaagtcagccagcaggtggcccacgacctgatgcaggtcaccctctacagcgaaaaccagggcagcgatccggccaagctcgccgccgagaccaccagcgtcctcaacgccgccgtcgccgacgcgcgcaaggtcaagggcgtgaccatcagcctgggcagtcgcaacagctatccggtctacgacgacaagggccagaagatcaccggctggcgcgagcgcgccgagctgcgcctggaaagctccgacttcgccgccctcggccagctttccgccgacctgctgggcaagctgaagatgggcggcatggacttcagcatcgccgatgcgacccgcaagaagaacgaggaccaattgatgaaaggcgccgtggacgcgttcaaggagcgcgcccagttgctcaccgaggcgctcggcggcaagggctacaagctggtcagcctgagcgtgaacagcgccggcgcaccgcgcccgtacccggtgatgcggatggcggcgatgaaggccgacgccagcttcggtggcgcccaggcgccggagatcgaggccgggaccagccaggtcacggtcaacgccgacggtgtgatcgaggtgcagatgccctgatccggccggcgcgcaccacaagaggcagcctccgggctgcctcttgcgtttccactgtctctcgcgcagcaaacgcggcctgcgtcgcgtttgcgcaaattcgaaaatgcgacattccctttcaatcggataacaacatctacactgaagcgacctcgacgcttgcggccggcacacgccctgcatagcttcgcgcaagacagctcacgaggctgtccctcgcagacaatcaaaataaccagaggtcactccatgcgtagaaacgccgtcatccgctccgcgatcatgccctcgctgctcggcgcagcgctggtcgccgccgttccccaggccttcgccagcaacctgatcttctgctcggaaggcagcccggccggcttcgatcccgcccagtacaccaccggtaccgatttcgacgccgcggcggaaaccgtcttcaaccgcctgacccagttcgagcgcggcggcaccaaggtccttcccggcctcgcggaaagctgggacgtcagcgacgacggcaagacctataccttccacctgcgcaagggcgtgaagttccacagtaccgactacttcaagccgacccgcgaattcaatgccgacgacgtgctgttcaccttcgaacgcatgctcgacaaggatcatccgttccgcaaggcctaccccaccgagtttccctacttcaccgacatgggcctggacaagaacatcgccagggtcgagaagctcgacgagcatacggtgaagttcaccctcaacgaggtcgacgcggccttcatccagaacctggcgatgcccttcccatcgatccagtccgccgaatacgccgcgcaactgctcaagcagggcaaggccagcgacatcaaccagaagccgatcggcaccggcccgttcgtgttcagccgctaccagaaggatgcgcagatccgcttcaagggcaacaaggactactggaagccggacgaggtgaaggtcgacaacctgatcttcgccatcaacaccgacgcctcggtgcgcgcgcagaagctcaaggccggcgagtgccagatcaccctcaacccgcgccccgccgacctcgacgcgctgaagaaggacccgaacctgaacctgccgtcgcaggccggcttcaacctcggctacatcgcctacaacgtcacccacaagccgttcgacaagctggaagtacgccaggcgctggacatggcggtgaacaaaaaggccatcatcgacgccgtctaccagggcgccggccagttggcgagcaacggcatgccaccgacccagtggtcctacgacgagaccatcaaggacgcgccctacgatccggccaaggccagggagctgctgaagaaggccggcgtcgccgaaggcaccgagatcaccctgtgggccatgccggtacaacgcccctacaaccccaacgccaagctgatggcggaaatgctgcagaacgattgggcgaagatcggtatcaaggcgaagatcgtcacctacgaatggggcgaatacatcaagcgcgccaagggcggcgagcatgacgccatgctgatcggctggagcggcgacaacggcgacccggacaactggctcggcaccctctacggctgcgacgcggtggacggcaacaacttctccaaatggtgcgacgccggctacgacaagctggtcaaggatgccaagcgcaccaccgaccagggcaagcgcaccgagctgtacaagcaggcccagcacatcctcaaggaacaggtgccgatcaccccgatcgcccactccaccgtgtaccagccgatgcgcaagacggtacacgacttcaggatcagtcccttcggcctgaactcgttctacgaggtcagcgtcggcaagtagcttcgcctgccagccgcgccgccccgccacgagcgaggcggcgcctctccccggggcggccgacccggccgtcccgctccagaggagtcatccatgcgaccacgctctgccctgcgctacagcctgctgctgctcgccttcgccgccagcgccgccatccaggcccagccgaagaccctggcggtgtgcaccgaagcggcgccggaagggttcgatccggcccgctatacctccggctacaccttcgacgcctcagcccatccgctgtacaacgcgctggccgcgttcgctccgggcagcgccacggtgatcccggccctggcggaaagctgggacgtctccgctgacggcctcgtctacaccttccgcctgcgccagggcgtgaaattccacagcaccgactacttcaagccaacccgcgaattcgacgccgacgacgtgctgttcagcttccagcgcatgctcgatccgcagcaccccgcccacgacctttcgcccagcggctacccctacgccgacgccatgcaactgcgcgacatcatcgagcgcatcgagaagatcgacgaacatcaggtgcgcttcgtcctcaagcacccggaggcgccgttcctcgccgacctggccatgccgttcggctcgatcctctccgccgaatatgccggccagttgatcgccaggggcaagggcgacgaactcaacagcaagccgatcggcaccggcccgttcgtcttcacccgctaccgcaaggatgcccaggtgcgctacgcagccaaccccgactactggaagggcaagccggccatcgaccacctggtgctggcgatcaccctcgaccccaacgtgcgcgtgcagcgcctgcgccgcaacgaatgccagatcgccctgacgcccaagcccgaagacgtcgccgcgttacgccaggacccgcaactgacggtgctggaagaagcggcgatgatcacctcacacgccgcgatcaacacccggcacgaaccgttcgacgacccgcgcgtgcgccgggcgatcgccatgggcttcaacaagtcgtcctacctgaagatcgtcttcggcgaccaggcccgcccggccatcggcccctacccgccgatgctgctcggctacgacgacagcatccgcgactggccctacgaccccgaacgggccaaggccctgctgaaggaagccggcgtcaccccggacacacccctgaacctctacatcagcaccggcagcggccccggcggcaacccggcgcgagtggcgcaactgatccagtccgacctggccgccatcggcatccgggtgaacatccgccagttcgagtggggcgagatggtcaagcgcaccaaggccggcgaacacgacatgatgctctacagctggatcggcgataacggcgacccggacaacttcctcacccacaacctcggctgcgcctcggtggagtccggggaaaatcgcgcgcgctggtgcgacaagggcttcgacgaagccatccgcaaggcgcgcatgagcaacgacgagagccaacgggtagcgctgtacaaggaagcgcagcggatcttccacgagcagatgccctggttgccgctggcgcatcctttgatgttcgacgcgcaacgcaagaacgtcagcggctaccgcatgagcccgatgtcggcgcgggacttttcgcgggtgaagctggactgatcgctgcgccgcacgcgggaagccctggtccttgccttcccgcgtgcggcgttattgttcggccggatcagccgccgaggccgaagggatcgtcgatggacgggctcggttgggtgaaccagcgcggtccttccttcgtcatgtagaagtgatcctccaggcgaatgccgaactcgccgggcacgcagatcatcggttcgttgctgaagcacatgccgacatccagcggcgtgcgatcgccacgcaccaggtacgggccttcgtggacgtccatgccgatgccatgcccggtgcggtgcggcaggccaggcaggcggtagtccggccccaggccgttggcctccagcgaacgccgcgcggcggcgtccaccgcctcgcagggctggcccagacgcgcggcctcgaaggccgccagttgggcgtcgcgctccatcccccagaattcgcgctggcgtgcgctaggcgtgccgaacacatagctgcgggtgatatccgactggtagccgtggacctggcagccggtatcgatcagcaccatgtcgccatccttcagcacctgcgcatgcttcaccccatgcgggaaggcactggcggcaccgaacaggacgatgcagaaggtcgaaccgggcgcgcccaccttgcggtgcgcctggtggatgaactcggcgacttcggtggtgctgatgccttcgcggagaatgctcgccgcggccttctgcacttccagggtcatgtccttggcccgctgcatcagcgccagctcctcggccgacttgcgcatccgtccctggtcgatcagcggcgcggcgctgacgaagttcctgcccggcgcctgttggcgcaagcgctcgaacatgccgaacggcaggctcggacacagtgcgaccgtgctgcgctcgcccacgccgagcgcctccaggcgatcgagcagcaggcgatagggatcctggtgttcctcccaggtgtggatggcgccatcgaccacctggaagtcgcgcaccgtaccttcctcgaaggccggcgcaaggtattcgagggcgccctcggcgggcagtagagcacccaccaggcgttcactggggtgccattgcacgccgctgaagtaacgcaggttgctgcctgcatgcaggtacgccgcggcgatgccatgctcgcccatccacgcctgggccgcggcgattcgcgcacggtaagacgccaggccgatcggctgcgcgccgtccatcatgttccgcagacgctccagcgcctgcgcaggggtactcccgccaacacccacggtcatttgttgttctcctcgtctggaccgggctgaaatttaagtcgagcttaaattcaggtcaaaacaaattttcagtcacacttaaaaataggggttcgggtagttcatctgtcagactttattgacgccccgcgctgggtatactgcgcctttcaacaagagtctccccaatgaccgtagaccgcatcggcgaacgcctgcgtcgctatcgccgcgccgccaagaagaccctgcaccaagtcgccagcgaatccggtctcaccgcgagcttcctctcccaggcggagcgcaacctcaccggtgtatcgatctcttccctggccaacatcgccaagtcgctgaatatcccgctcaatgccctgttcgaccaaccggcacaaccccagcccgactcccacgaaggcgagcgggtacgctacaccatcgagggccagccgctggcctacgaacgcctgtccagctccttccccggcaacctgatcaatgcggtcaagatgaacatgccggtgggctaccagtcggagctgatctcccatgagggcgccgagttctcctacgtcctgtccgggcagatcgtctacaccatcgaggggcgccagtaccccctcggcgccggcgactcggtgcacttcgacgcgaccaagacccattgcctggccaacgtcggcagcgatgtggcggaagtcctgaccatcaccaccatgggcctgttcgacgaccatccgacgccctgagccagtccgtagcgcaccttcccatcctgtcaggcaaacgttttcgcaagagaaatgttagtcgtgcttaattttcgttgaccacaatttcagcatgacttaatttcggcatcagcgaatcgtcgaccaacaacaaacggacgatcgctgtcgccgcacagggtccatggctgtcacccgccatccatggaaaggcgagagttgccatggcccataaggccgatcctcagacgatgcccttagaaaaagaaaaaatgaggtttgcatgcgtaagatccttccccttcgggcctggctggcagccggtctgatcctcggctccccgttctcccacgccgccagcaacctggtgttctgctcggagggcagcccggccggcttcgatcccgcccagtacaccaccggcaccgactacgacgcgacctcggtcaccctgttcaaccgcctcgtccagttcgagcgcggcggcacccgggcgatcccggccctggcggaaagctgggacatcggcgacgacggcaagacctacaccttccacctgcgcaagggtgtgaagttccacagcaccgactacttcaagccgacccgcgaattcaacgccgacgatgtgctgttcaccttccagcgcatgctcgacaagaatcatccgttccgcaaggcctaccccaccgagtttccctacttcaccgacatgggcctggacaagaacatcgccagggtcgagaagctcgacgagcacagggtgaagttcaccctcaacgaggtcgacgccgccttcatccagaacctggcgatggacgtcgcctcgatccagtccgccgagtacgccgggcagttgctcgaggccggcaagccacagcagatcaaccagaagccgatcggcaccgggcctttcatcctgagccgctaccagaaggatgcgcagatccgcttcaagggcaacaaggactactggaaacccgaagacgtgaagatcgacaacctgatcttctcgatcaacaccgacgccgcggtgcgcgcgcagaagctcaaggccggcgagtgccagatcaccctcaacccacgccccgccgatctcaaggccctgcaggaagcggcgaacctgaaggtgccctcgcagccaggcttcaacctcggctacatcgcctacaacgtcacccacaagccgttcgaccagctcgaagtacgccaggcgctggacatggcggtgaacaagcaggccatcatcgacgccgtctaccagggtgccgggcaactggcggtgaacggcatgccgccgacccagtggtcctatgacgaaaccatcaaggacgccccgttcgatccggccaaggcccgggaactgctgaagaaggccggcgtcaccgagggcaccgagatcaccctgtgggcgatgccggtgcagcgtccctacaaccccaacgccaagctgatggcggagatgatccaggccgactgggcgaagatcggcatcaaggccaggatcgtcagctacgaatggggcgagtacatcaagcgcgcccatgccggcgagcatgacgccatgctgttcggctggaccggcgacaacggcgatccggacaactggctggcgaccctctacggctgcgactcgatcaacggcaacaacgtatcgaaatggtgcgacgcggcctacgacaagctggtcaaggctgccaagcgggtctccgaccaggacaagcgcagcgagctgtacaagcaggcccagcacatcctcaaggagcaggtgccgatcaccccgatcgcccactccaccgtgtaccagccgatgaacaagtcggtgcatgacttcaagatcagccccttctcgcggaacgccttctatggcgtagccaaccagccctgatgccgacgccaccccggtcgtgaaacgaccggggtgcagaagaacggcacgacccgtacttcatttctttgcttttcctgcccgtgttccagaacggcgctgcgcgcgttccgccaggagcgctcgcctcgccgtattcgaccgccgcgcccaggcgcgggcgaaaccggcgcaaacctggtgggtaaaacaggtgccatgacaacaataaagggagcaatcaggtgatgagataccaacgagtgaccggcgcgacgctgggattggccttgatggcatcggccgcgccaggctgggcagcggacgagcaggcaaccccgccgaccccggacaatcccagctacgccgcccaggtgcagagcatccccagcgtggagaaaccgatcaagggccaggccggcgccagcgggctgttcgaggggcagagcctgaccctgaccacccgcaacttctactcgcgggaaaacatgaaggacagcttcaccttccgcattcccaaggccggcggcggctcccagcgcatccaccagcgcaacgcctgggtccagggcacggtgctcaagtacagctcgggctacacccagggcagcatcggcttcggcttcgacgtcgcagccttcaacgagatcgccctggagcgcggcaagggccgcatcggcggcggcggcaaccggaccctggcgaacagcgatggcgaggcgatcggcgagtggtccaagctgggcgtcgccaacatccgcctgcgcgcctcgaataccgaattcaaggccggtcgcttcctggtcaacactccagtgttcagctatatcgacaaccgtgccctgccctccagcttcaccggcttcgccgtgaccagcgaggagctggacaacctcagcctgcaggccggcagcttccgcaaggtcagcccgcggaccggttccggcgacgaggacatgaccaccgagtacggcacccgccaggtcaagggcgaccgcctgaactacctgggcggcaactacaagccgctcgacgggctggaaatctccctctatggctcgcatttccaggacgtctggaaccagtactacctgggcgtgacccacgacatcggcgacctcgagaacggcatcgccctgcgcaccgccttcaacggctaccacaccggcgacaccggcgcgcgcgaggccggctacatcgacaacgacacctggagcctggccttcactctcggccatcgcgcccacgccctgaccctggcctaccagcaggtcgacggcaacgaatacttcgactacgtgcacgagacctcggcgatcttcctggccaactcgatgctggccgactacaacagccccaacgagaagtccgcgcagatccgctacgagaccgactggagctactacggggtccccggcctgagcaccggcgtgtggtacgtgaagggctgggacatcgacggcacccactacgacggcgatcgcaacggtgcctacggcaactacgccgaggtgcgcgcccaggacggcgagaagcaccacgagctgggcctgatggcggcctacaaggtgcagaacgggccgatcaaggacagcaccttcaagctcacctacatgatgcacaaggccagccagaaccaggtcgacggcagcgtcaacgaactgcgcctggtcagcaccttccccttcaacctgctgtaaacctgcgacaaccggcggccccggcgacggggcccacgaggaggaccccatgctccacccgttgctccgacacctgcccctggccctggcgctatgcgccgccggcgcggcccaggcgaagaacctggtggtctgcaccgaggccagcccggaaggcttcgacatcgtccagtacaccggcgcggtgaccgccgacgcctccgcggaaaccgtgttcaaccgcctgctcgccttccgccccggcaccaccgaggtgatcccggggctggccgagcgctgggacgtcagcgccgacggactgagctataccttccacctgcgccccggcgtgaaattccataccaccgactacttcaagccgacccggagcctgaatgccgatgatgtgctgtggaccttccagcgcgccctcgatccgaagcatccctggcatgcctcggcgctgcgcggctacgcctacttcgacgcgatgggcatgggcgagctgatcaagtcggtggaaaaggtcgacgagctcaccgtgcgcttcgtcctcaaccgtcccgaagcgccgttcctgcgcgatatggcgatgcccttcgcgtccatctattccgccgagtacggcgaccagttgctcgccgccggcaagcagggccagctgaacaaccagccgatcggcaccgggccgttcgtcttcaagcgctacgccaaggacgcccaggtccgctatacggcgaacccggactactacgccggcaagccgccgatcgacaacctgatgttcgccattaccctcgatcccaacgtgcgcatgcagaaggtccgtgccggcgagtgccaggtctcgctgtacccgaaaccggaggacgtgccgcgcctgaagcaggacccgaacctggcggtggacgagatcgatgccctgctgaccacctacattgccatcaacacccagcacaagccgctcgacgacccgcgcgtgcgccaggcgatcaacctcgcgctggacaagaaggccatgctcgacgcggtgttcggccccggcgcggccagtccggcggtcggtccctatcccccgaccctgctcggctacaaccattcgatccaggactggccgcacgatcccgaacgcgccagggcgctgctcaaggaagccggcgcggaaaatctcaggatcaccctgttcattcgcaacggcacctcgcctaccatccccaaccccgccctggcggcacagatgctgcaggcagacctggccaaggccggcatccagctgaccatccgttccctggaatggggcgagctgctcaagcgttcgaaggccggcgagcacgacctgtcgctgcttggctgggccggcgacaacggcgacccggacaacttcctcagcccgaacctgagctgcgccgccgccgagtcgggtgaaaaccaggcgcgctggtgcgacaaggacttcgaggcgctgatgcgcaaggcccgcgaggtgagcgatccggccgagcgggcgaaactgtacgagcaggcccaggtggtattccacgaacaggccccatggataccgctggcctacccgaagctgttcaacgtccggcggaacacggtgcagggctacgtgatcaatccgttgagcaacaacaacttcgccaccacctcggtgaagccgtagaagaacaaggaccacagccccgccgccagcggggcgcacggtccgcgatgaggagttacccgccaacatgcttagtttcattgcacgacgattggggttgctgatccccaccttcttcggcgtgacgctgctcaccttcgcgctgatccgcctgattcccggcgacccggtggaagtgatgatgggcgaacgtcgcgtcgatccgcagatgcatgccgaggccctgcaccgcctgggcctggacaagccgttgtaccagcagtacctggactacgtgggcaacctggcacagggcaatctcggcgaatcgctgaccacccgcgaaggcgtctggcacgaattcctcaccctgttcccggcgaccctggaactgtccctggccgccatgctcttcgccggcaccttcggcctgctggccggggtgatcgccgccctgaaacgcggttcgctgttcgaccacggggtgatgacggtgtccctcgccggctattcgatgccgatcttctggtggggcctgatcctgatcatgctgttctccgtgtcgctgggctggacgccggtgtccggccgtctcgacctgctctacgacatcgagccgaagaccggcttcatgctgatcgacaccctgctttccgacgaacagggctcgttcctcgatgccgtgcgccacctgatcctgccggccatcgtgctgggcaccatcccgctggcggtgattgcccgcatgacccgctcggcgatgctcgaggtgctgcgcgaagactatgtgcgcaccgcccgcgccaagggcctgtcgccggcccgggtggtcttcgtgcacgccctgcgcaacgcgctgattccggtgctgacggtattcggcctgcaggtcggcacgctgctcgccggcgcggtgctgaccgaaaccatcttctcctggccgggcatcggcaagtggctgatcgacgccatcagccgtcgcgactacccggtagtgcagaacggcatcctgctggtcgccaccctcgtcatcctggtcaatttcgtcgtggacatcctctacggcctggccaacccgcgcattcgccaccaacgctgaggagccagccgatgaacgccatgcacaacgctcccgccagcgacccgagcctggtctacccgtccccgctgaaggaattctggcaggccttcgcgcacaacaagggcgccctcggcggcctgctgttcatgctgctgatcgtgttctgcgcgctgttcgccccctgggtcgccccctacgatccaagcgagcagttccgggacttcctgctgaccccgccatcctggctggaaggcggccaggcgcgcttcctgctcggcaccgacgagctgggccgcgacctgctctcgcggctgatccacggcgcccgcctgtcgctgctgatcggcctgtcctcggtggtgatctcgctgatccccggcatcctcctcggcctgctcgccggcttctcgccgaaccgtgccgggccgctgatcatgcgcctgatggacatcatgctggcgctgccgtcgctgctgctggcggtggccatcgtggcgatcctcggcccgggcctgatcaacaccgtgatcgccatcgccatcgtctcgctgccggcctacgtacgcctgacccgcgccgcggtgatgaccgagctaaaccgcgactacgtcaccgcctcgcgcctcgccggcgccggcaccctgcgactgatgttcgtctgcgtgctgccgaactgcatggcgccgctgatcgtccaggccaccctgagcttctcttcggcgatcctcgacgccgccgccctcggcttcctcggcctcggcgtgcaaccgccgacccccgagtggggcaccatgctcgcctccgcccgcgactacatcgagcgcgcctggtgggtggtcagcctgcccggcctgaccatcctgctcagcgtactggcgatcaacctgatgggcgatggcctgcgcgacgccctcgatccgaaactgaagaacgcggcatgaggagcacaaccatgaacagcgcatccgtatccgcgccacaggagaccgccgcatgagcctcctcgatatcaagaacctcagcgtacgcttcggcgacaccaccgccgtgcccgtggtcgacggcctcgacctgagcgtcgacaagggcgaggtgctggccatcgtcggcgagtccggctccggcaagtcggtgaccatgatggccctgatgggcctgatcgacgcccccggctgggtatccgccgatcacctgcgcttcgacggccacgacatgctcaccctcaagggccgccagcgccggcgcatcgtcggcaaggacatggcgatggtcttccaggacccgatgaccgccctcaaccccagctacaccgtcggctaccagatcgaggaggtcctccgcctgcatctcggcctgcgcggcaaggccctgcgccagcgcgccctggaactgctcgaacgggtcgagatcccggccgccgccagccgtctcgacgcctacccgcaccagctctccggcggcatgagccagcgcgtggcgatcgccatggctatcgccgccgagcccaagctgctgatcgccgacgagccgaccaccgccctcgacgtgaccatccaggcgcagatcatggagctgctgctgaacctgcagcgcgaccaggacatggcgctgatcctgatcacccacgatctcgccgtggtcgccgagaccgcccagcgcgtctgcgtgatgtacgccggcgaagcggtggagatcggcggcgtgccggcgctgttcgaccgcccgacccatccctacaccgaggcgctgatcaaggcgatccccgagcactgtgccggcgaagcccgtctggccaccctgcccggcatcgttccggggcgctacgaccgcccgcgcggttgcctgctgtcgccacgctgcccctatgcccaggagcattgccgccaggagcggccggccctggaggcacacgagcgcggcgcggtgcgctgcttctatccgttgaacctgctgaacgaggtggcctgatggaaaccgttctgaccgcccgtgatctgacccgtcactacgaagtctcccgcggcctgttcaagggccacgcccaggtgcgcgcgctgaacggcgtatcgttcgaactggaagccggcaagaccctcgccgtggtcggcgagtccggctgcggcaagtcgaccctggcgcgcgccctgaccctgatcgaggaacccacctccggctcgctgaaaatcgccgggcaggaggtcaagggcgccagcaaggaccagcgccggcagttgcgccgcgacgtgcagatggtcttccagaacccctacgcctcgctcaatccgcgacagaagatcggcgaccagttggccgagccgctgctgatcaacaccgcgctgtcgcgcgaggaacgccgcgaaaaggtccagcagatgatgcgccaggtcggcctgcggccggagcattaccagcgctacccgcacatgttctccggcggccagcgccagcgcatcgccctggcccgggcgatgatgctgcaacccaaggtgctggtggcggacgagccgacctcggccctcgacgtgtcgatccaggcccaggtactgaacctgttcatggacctgcagcagcagttccgcaccgcctacgtgttcatctcgcacaacctggcggtggtccgccacgtcgccgacgacgtcctggtgatgtacctcggccgaccggcggagatggggccggcggacaagctctacgagaacccgctgcatccctatacccgtgcgctgctctcggcgaccccggcgatccacccggacccgacgaagccgaagatccgcatccagggcgaactgccgaacccgctgaacccgccggagggctgcgccttccacaagcgctgtccctacgccaccgagcgctgccgcagcgaggtgcccgagctgcgcctgctcgaccagcgccaggtggcctgccaccacgccgagcagttcctcggctgagcgctacggggcgctcgccgccccgcagcccttcagagctggcgcagcagcgccagccttaccccgaaccctatcaacaacccaccgaagccccactgctgaaggcgctgtgcccgcggccgggacgccagccagcggcccaggcggccaccggccagcgcataggcgcagtcgaaggccagaccaaccaggaccaggaccgcaccgagcgcggcgaactggacggccagcgaaccggcctcgggactgacgaactgcggcagcagcaccgaacagaacagcagggccttggggttcagcaggttggtcaggagtccgcgcagcaaggcccggcggtcggcgtgagggaccaccggcgcggagcccgcgtcgctggtcggcaaggccagtccgccaccgcgcagcatctgcaggccaagccaggcgaggtagacggcgccgagcagacgcaccaggtcgaaggtccagggagcggtacggaacagcagcgccagcccggtcgcggccatcagcacatggcaggcccgagccagggccaggccgagggcggtgaccagcgccgcgcgacggccctggcgggcgccggtctggaacagcaggagcatgtccggtccggggaccaggtaaaccaccgccagggcaatcaggaaagcgctcgtgtccatcgtatcggctccaggaaggtgacccggataacgattctatgcccgcaaggcagggcaggtgcttgcgttttccaccagccaacccattctatttggcagtaaattccattctccgaagactatccatccggatatgccaagatgaaactcgacgcctatgaccaccgcatactcgccgccctccagcgcgacggccgcctgagcaacgtccaactggccgaggagatcggcctctccccgtccccatgcctgcgccgcgtgcgcctgctggaagaggccggggtgattcgcggctaccaggccagcatcgaccgcgacgaggtcggcctcggcctcacggtgttcgtcgggatcaaggtggagcgccaccgccaggagcaggccgaggccttccaccgtgcggtggtcgacctcccggaggtgatctcggtgcacctcgtctccggcgagtcggacttcctcctgcaagtggtggtccccgacctgcgcgcctatgaacgcctgctcagcgagaccctgctgcgcctgcccggggtcagcgacattcgcagcaacttcgcgatcaagacggtcaaggcgcccgcgccgctgccgctcggccacctggccggctgagcgctcagccgcggaagaagcggtagaagcgcagcaggtcggcctgctgcgtcgccaggtcgctctcgacgaaggttacctcgctatgcgcggggctttgcgccaggcgcgagaggtccagtggatggacgaagcccagcagcggatagccgcccatgctctggcggtcggccatcagcacgatgggttggccatcgggcggaacctggatagcgccctccaccacgccctgcgaccaggcgcgcggcgccccgcgcagtggctcgccggccaggcggacgcccatgcgatcggaccgcgggctgattcgccaggcgctggcgaagaaggcttgccggctggctgcgtcgaaggccgccgcatcgccgccaagcagcacgcgcaagggccgctgctgccggtagtccggctggaaacgccagggcacgctggcatcccacggacacgccgctcccgcttcggcacacggcaggcaatcgccctccgccaggatccggccatcgccctgtaaaccgccgagcccgtcgcgaacctggcaggcgacgctgcccagtaccggcctcgcccggaaaccgccggcgcaggccaggtaggcacgctgcccggcctcggcgaagcccagttcgatgcgttgcccgcggcggacacggaagcgactccagggcaggcattcgcgaccgtccaccgtcagcgccaggcgcgctccggtcaacgccagccaggtcgcctccaccctgcactccagcaccaagccgccgaaagcgatttccagcaatggcgtcccccagggattaccgagcagacgattggcccaggctgccgcctggcggtccagagggccgcccggggatacgccgaggtgctgccagccgcgccggccgtcgtcctgcagcaggctctgcggacccgccttgacgacccgcaaaccattcattcgcgcccgcccaggtcgaggaaagcctcgcgcccgatggcgacgaagcgcacccggtcgcccagcgccagtgggcacggaggagtggcggccggatcgaacggacgccacggactgcgtcccagcaggtgccagccgccgggcgaggcctgcggatagatcgccgtctgcgcctcggcaatggccaggctgccggccggtacgcgcgcccgcggggtggcccgccgcggcaggaccaggcgcggatcgaggccgccgaggtaggcgaatcccggagcgaaaccgatcgcgccgacccggtattcggccgcgctgtgcagttcgatcaccccttcgccagtcaatccgcaggcaaccgctaccgtcgcgaggtcctcgccggcgtaccagacgggaatctcgtgcaggcgcccggcatcctcggcggggcgccaggcgtgccactccaccagcagcggacccaggcgttcttccagtacctgcggggcgatgcggtaggggtcgtaatgcagcatcagggtggtccagcccggcaccagatccctgacgccttcgccgagcccctcgcgcagacgtctggccagctcggccaggcgcacagacaggtccacttcgggctcttcggcgagcgtcagcagcagggcttcggcaccagcgggttcgatgcggatcacaggctgtccagggccgcgcgcaggcgccggaggaccgccagcgactgcgggttgtcgccatgcacgcaaagactgtcggcggtcaggcgcagcgggttgccgtcgtagtcggggaaggcttcgccgcgggcgatggccagggcctgttcgatgacccgctgcggatcgtgatgcaccgcgccgccaagccgccgcggcgccagccgaccgtccggcaggtaggcgcgatcggcgaaggcctcgaacagcagcggcacgtcggcctcgtcggccagttccagctcgcggccgttgtcggccagggccagcaccatcagcggcaggcccttgcgataggcggcgcaggcgtcgagcacggcgcgcagcagctcatcgtcgccgaccaggtcgttgtacagcgcgccatgcggcttgacgtaggccacctgggtaccgagggaacggcagaaagcgtccagcgcgccgatctggtacagcaccatggcatgcacctcttcggcagagcaggccagcgaacgccggccgaagccgctcaggtcgggataggcagggtgcgcgccgatgctcacgccatggcgtaccgccagctccaccgcgcgccgcatggtgagcggatcgccagcgtggaagccgcaagccaggttggcctggtcaaccagcggcatgctgtggacatcgtcgcccatgcgccaggcgccaaagctttcgcccatgtcgcagttgagcaggatacgccggccggtgtcgttcattgtgcgttcctttcgaggccaggattacggaaaaatgagcgcagtgctggcgaattagcgtcaggtagcatactcaggcactgagaacaggagtaaattctcctcttttgcaccgacgaccttgcattcatgaaagttctcatcctggcggcctatgcgctgagcatcctctatgtccatttccgcggccgggtacgccacaagctgtcgcgccaattgagcgaccactccagcttcctcgctccgatcaactgcctgatgtacctgttctcgaaggtaccgaaccgcccttacctggcaccgcaaaccttccccgaactgcaggttctggtcgacaactggcaagccatccgcagcgaggcgctgcacctgcacgacgccggcaacatcaagcgttccgaacagtacgacgatatcggtttcaactcgttcttcaagagcggctggaagcgcttctacctgaaatggtacgacgaggcccatccctccgccggacaactctgcccgcagaccaccgccctgttgcggcagattccctcggtcaaggcggcgatgttcgccgaactgccgccgggctcgaagctggtgcgacaccgcgatccctacgccggctcgctgcgcttccacctgggactgttcacccccaacgacccggcctgcttcatcgaggtggacggcgagcgctaccactggcgcgacggcgaggcggtggtgttcgatgaaaccttcatccactacgcggaaaacgccaccgaacacaaccgcatcattctcttctgcgacatcgagcggccgctgacccagggctgggccaccgccttcaaccgctggttcagccgcaacgtgatggctgccgcggccgccccgaacaacgcaggcgaccggaccggcggactcaatcggatcttcgacagcctctacaagatccgcctgcagggcaaacgtttgaagaagcgcaaccgcaagctctactacctgcagaaatggggcttcttcgccctggtactggctttcatcctgtggatctgaggcccggcgacgcaaggccccgatagctccgtggggtacatgacaccaacggcgtcatccgccgatacctcgccgaaatggcggataaccgctctgcggttattcgccctacgccacggacaacgcgaagtcccgatagctccgtagggcgcatgacgccaacggcgtcatccgccgacaccccgccgaaatggcggataaccgctctgcggttattcgctctacgccacggacagcgcgaagtcccaatagctccgtagggtggatgacgccaacggcgtcatccgccgacaccccgccgaaatggcggataaccgctctgcggttattcgccctacaccccgcaaagcccagcagtcccggcagttggcaacgaaaaggctcccttgggagcctttttcattcatccgttcagtacacgtcgcgtcggtaacgtccttcgtcggccaggcgctgcaaggcctcctcaccgagcacttcgcgcagcacccggtcgacaccgccggccatgccctgcaggctgccgcagacgtacaaggccgcaccctcgtcaatccagcgccgcagttcatccgccgcttcatgcaggcggtcctggacatagatcttctccgcctggtcgcgggagaaggccaggtccaggcgttgcagctcacccctggccagggcttgctccagctccgcacgacagtagtagtcgtgggcgaaattgcgttcgccgaacagcagccagttgcgcttgcgcccggcggcaatgctggcgcgcaacaggctgcgcaggccggcgagcccggtaccgttgccgatgaggatcagcggcacgtcatcctccggcaggtggaagcccgcgttgcggcgcaggcgcagggtcagcgcggcgccgagcggcaggtactcggtgagccagccggagcagatgcccaggctgccgtcggcatgctgctcctggcgtacgatcagttgcaggtcgccatcgctctgcagcgacgcgatggagtactggcgcacggaaagcggaatcagcgcatccagcagcgcctgcgggtgcaagccgaccaggtgttcgaaagagtccggcagcaagcgcccagccagggcctgctccaggctctgctcgacgccctcgaccgccacccgcgcctggccgtccaggttatgccgctgcagccattcgcggatgcgcgcgggcgcctggtgcgggacgatctccagcagatcgccggcgcgccattggatggcgctgtcggtcggcgcacgcaggtccagcagccaggtcgactcgccctggctgccaggattcaggcactcccgccgcgccagcgaccagacctcgaaggccggcgcttcccaggccgccggggcggcaccgccggtcacctcggccaggctttcctgccattggcgcagggccgcggcgtcgccatcatcgacctccaccggggcgaacaggctccgcgcgccctgcccctgcaaccagccctgcatgcgccgggcgaagccgcagaactgctcgtactggcgatctcccaaggccagcagggcgtagctcaggccatcgaggctggcggcctggccaagcaccttgcgttcgaagccgcgggcgctgtccggcgcctcaccgtcgccgaaggtgctgaccacgaacagcgccttgcgcgcctcggcgagttgcccggcatccaggcgcgccagcgattcgacccgcaccggcaacccggccgcctgcaactggccggcgctctgccaggccagttgctcggcaaaaccgctctggctggcgtagccgatcaaccagggctcgccgctggcgccggcgctgccgcccaggtcggcgcggctcgcccgtaccgcgcgtttcttgcgccggcggtcgaggtagagcagccagccggtgatgaagaacagcggcatcgccaggctggcgagcatcatcaggatgcgtccggccatgccgaaatagctgcctacgtgcaatgcatagacgctggccagcaactggctgccgaaagaacggtcgctatagcgctggtcgcttttcacctggccgttggccgggtccagggtcagggtgttgaaggcacgctcgtgcggcgcgtcggtcagacgatagaacactgtcgccggctggccgcccgccggcggcaggcgcaggttgtaggcctgcaagcggtcgccgccggcctggcggatgctgttccataccgccgcgtagtcgaccaccagcggagccgcatcggccgggcgctcgccacgtccgcccggcttgccgcgctgcgcctgctggccggcgggcgcgtcgtcgagcagtttgaacaggccgttgcggtaccactcgtaggaccagtacaggccggtcagcgcagccagcaggtagagcgccaggcaccaggtgccggccacggcatgcaggtcccagttgaaactgcgccccttgcgcgaccagtcgagggtcagccaggcgcgccagtcgaaaaccttgcgcggccagcgcaggtagagaccggacaggcagaagaagatcaggatcagggtgcaggcggcggtgacctgcttgccgtactcgcccatggcgaggaaccggtgcagttgcatcatcaggttgaagaaaccctcgccgcgcggctcgccgacgaaagccccggtgtagggatcgatccagcgcgactcgccgcggcgctgtcccggcggcggggtatagaagatccgcccggccttgtcgctgtccatctcgacccagacgaaggccactttccgccccggctcggcaccttcgatacggcgcaccagttcgtccagcggcagcacaccctcggagcgcttctgcaccaccagcacgtcagggttgagcgcgcgcatcagctcgtcctggaacgacagggtcgctccggtgacgcccatcagcgccagcaccaggccggcgctgataccgaagaaccaatgcaactggaaccagactttcttcacaggatcaccttcacggccgccgcgcggcaacaacgggactacgccgacgccaagcgccggccagacgacacgaggacgtcggcgggcaattctatttgataatcagttgcgataaagccgaattaacgttctttacgctctatttacccacctggatgcgggaaagccccatcccgtagagggaatggggctttcgtggggagcgagagcggctgtcagaagtggaagttggtgctgaacagtatcgtccttccagcggcctgggacgcatagtgcgccgcataggctttgtcgaagtacttcttgtcgaacacattctgcacgttcaactggaaatcgacgttcttgctcagtttgtagctggccattgcgtcatagcgccagtaatcggggacatagacggtattgccaacgtcgccatagaccttgtcgacatagaaagccccgccgccgatggtggtcttcgggaagatgtcataggtggtccagagactgaagctgttcttcggcgtatttggcatctcgttgccgttgttggaagccgccgatgcgttcacattgccgttacgcccagccttaccggcatcgaccaactcgctgtccaggtagctgtagcccgcgaacaccttccacttctcggtcagcttgccgctggcgctcaactccacgccgtcgacgcgggattgtccggcgttgtcgtaggtctggttggcgaccaggatgcgggtattgtccttgtcggtgcggaagatcgcggcactcagctccagccgctcgttgaagaaagcccacttggtaccaagctcgtagttcgtggtttcttccggctcaaggttgttgctgatggcgaacccgtcgacagcattcgaggtatccccattatcgagcatgctacccggcggcgtagccgaagtggcgtaggacgcatagatgctgccgttgggtacaggcttccacaccaagcctgcctgccagttccagaagctcgacttgtcgctgagtttggtagcgggtcttacaccgtggttcttcgccgtagtttcgaaactatcgaagcgcgcgccaatattgacctgccactgctcgttcaggtcgatggtgtcgaacgcatatattgccttggtggtgccgaccgtattcagcggcgcatatttccgggtaatactgccattccatggatcgtgcggattgggattttccagactagtgcagttatagccgctaggcgccccgatcagcgatggattgcacttgttgctgcccaggccggtattggtatcgacggtatacccatcgcgcttgctgtcttctcggctgaactccaggccggtgctgaagctgttcttgaagccacccaggtagaactctccaaacaggtcagtctggttgactgctgtggtggtggtacttacccgattgttctggcggcgccagaccgagccattgttgatgttgccctggctgtcatccggttgtgtccacagatagtcctgatgactgttgccgtaacgcgaggtattgcgaatagtgaggctgtcagtcagatcatgctcaacggtgatggtactggtatcgatgcggctcttctggaaatcgcgccccgtcagcccatagaaattgcctcgatcgacattcaccggtttgtccggattgtgcttgctgcgatcgctactcttggcatagggaatgcccgaatccggggtatcgtcactttccaggtgataatggctgacggtcactcgggtcggcgagccaagaccgaaggtgagcgacggcgctacgccccagcgactgacatcgacttcatcgcggcccgcgacattggcatcgtgcttgagaagattcagccggaatgccgcattgccatcgaggaattcctggttgaggtccagggtgtagcggcgagtctggtcagaaccataggtgaagcctccatcgatgaagttcccagccttggcctgcttgctgacgagattgaggctgccgccggccgagccccgtcctccgaatgccgagttagggcccttgctgacctcgatctgctcaaggttgaagatctcgcgggtctgtgcaccagtatcgcgtacaccatcgacgtaagtatcgctttgcgcatcgaagccgcgaatgaatggccggtcaccggtgggattgccgccctcgcccgcgccaaaggtaatacctggaacggtacgcagtgcatcctggagagacacggcggcggtatccttgatcacctgctttggtactaccgtgacggagcgcggcgtatccaagagcggcgcggtgtacttcttcgacgccgagcggtcgacgttgtaggtggtttcgtcctgctgctcgccgacgatggtggccgcatccagcgacagtacgcggtccttgtcggtctttttctgcccggcctcgtcggcgtgggctgcctgcggtgcggcgatggcggtgatggccacaccgatggccgaagccagcagacgttgcgaagaaacggcggtatccgtggactgacgcgacattcgaaacccctccccgggagctgtgaaggtcgcggaatttattgcagatcagaattgttatcaattattacggattcgcattcgacaggaatttacattctttacaattttctcattacattttttcccatctcgctcgtctggaacatttggcggttttacatggccaatgcaaatcaatatcattggcaatcatttcgccttcatggacagcgccatgttgctgcatattcccgccatcttcaccgccgaggaagtctcccggatccgcgcagccctggagcaggcggaatgggccgacggcaaggcgaccgccggctaccaatcggccaaggccaagcacaacctgcaactgccgcaggaccacccgctggcccgggagatcggcgaagccatgctgcagcgcctgtggaaccatcccctgttcatgtccgccgccctgccgctcaaggtcttcccgccgctgttcaactgctataccggcgggggctcgttcgacttccacatcgacaacgccgtgcgcgacatccatggcggccgcgagcgggtccgtaccgacctgtcctcgaccctcttcttcagcgacccggaggactatgacggcggcgaactggtgatccaggacacctacggcctgcaacaggtgaagctgcccgccggcgatctggtgctctaccccggcaccagcctgcacaaggtcaatccggtcacccgcggcgcgcgctacgcctcgttcttctggacccagagcctggtccgcgaagacagccagcgcaccctgctattcgaaatggaccagtcgatccagcgactcacccgcgacgtccccgaccatccctcgctgatccgcctcaccggtacctaccacaatctcctgcggcgctggtcggaactctgaacatgcgccacctgctgcttcgtcacgacgcgctggacgccgaaggtttcgccgcacaactggccggtaccccgggcgaggttgcccaggccatccttggcgctgcgcgcgagggcctgacggaagcccaggccctgctcggacagatccttctggacggccaaggcatccagcgcgacccgaccctggcgcggacctggttcacgatcgccgccgaacgcggccacgcaatggcgcgcaatatgctcgctcgctgtcttgaacatggctggggcggcccggcggatccagccgcggcagccgtccactatcggatcgccgcccaggccggccttgactgggcccgctacaacctggccaatctccacgccaccggccgcggcgtgtcccaggaccagccgcgcgcctatgcgctgtatcggcaagcggccgagcagggccacgcgaaatcgatgaacctggtggggcgctaccacgaagaaggcctggtggtcgctcgcgacctggcgcaagctgcgcactggtatcgacgttccgccgagggcggcgattttcgcggccagttcagccacgccgcgatgctcagcgcctcgggccgccatgccgaagccgaaacctggctccggcgtgccctcgaaggcggcaacctgaacttcctgcgcagtgcccgccatggcctggagcagtcggcccacccgccgttccgcagcctggcgctggcctactaccgacgcgcggcgcagttgggcgacgacaccgatcgagaggctctggaacaggcgctcgaacgtcacgggtacgcacgactgcccgtctgacgaacaacgcccaaccctttgttcacacccacataacacttttttgacaagcctttccctaccctcgccgcttcatcgaggcgagcgacgatcgcgcctccggtccatcgtacgaggctatcgtgtcccccactccaccaagcgttacgcgcaatcgcatcgactgggccggcctgggctggctgttcctgttcttctggttcttctccggcatcacccaactgctcctgctgacctccggcaacagcggtttctccggtttccgcaacgccatggtgctgagcaccatctggcttgcgccggtgttgctgttcccgcgctggaccaagccgctggccgccgtcatcgggctggtgctgtgggccgcctcgctggtcggcctgagctatttcggcatctatcaccaggaattctcgcaaagcgtgatcttcgtgatgttcgagtcgaacaccgccgaggccagcgaatatttcagccagtacttcaacccctggatgactctcggcctggtgctctacagcctggtcgccatcctcctctggcgccgcctgcgcccggtctacctgccgcgcttcagcgccctgccggtggcggtgctgctgatcgtcgcgaccatcggttatccgttctacaagcaactggtcagccagggccgacccttcgacgaagccctggacaaggtccaggcgcgcatggaaccggcggtgccctggcaattgctgatcggctaccagcaataccgccagcaactgggcagcatgcaggcgctgttgcaaaagaacgcggccctaccgccgctgaagaacctcgtcgatgccaatggcgatacgccgcgcacgctggtcctggtgatcggcgaatccacgtcgcgcaagcacatgagcctctacggctatccacgcgaaacgaccccgcagttggacgcactgaaggccgcgaaccggaacctcacggtattcaacaacgtggtggcgtcgcggccatacaccatcgaggtgctgcagcaggtgctgacgttcgctgaccaggagcatcccgaccgcttcctcaccgatccgtcgctgatgaacctgatgaagcaggccggctacaagaccttctggatcaccaaccagcagaccatgaccaagcgcaacaccatgctgacgaccttcgcccagcagaccgatgcgcagttctacctgaacaaccagcgcagccagaacgccagccagctggacggcgcggtgctggcgcccttcgccaaggtgctggacgacccggcgccgaagaaattcatcgtggtccatctgctcggcacccacatgaactacaagtaccgctatcccgccgactacgctcgcttcgtcgaccgccagggcgccccggcggccctcagcgatgaccaggtggaggtctacaacagctacgacaacgccgtgctgtacaacgactacgtggtctccagcctgatcaagggcttcgccaacagcgatccgaacggcttcctggtctacctctcggaccatggcgaggaagtcttcgacgaagccccgcacgaccgtctcggccgcaacgaaggcgacccgacccgcggcatgtacaccgtgcccttcctggtctggacttcgcccagctggcagcagacccatccgcgcgacctgcaggccctggtcgaccgacgctacagcagcgaagacctgatccatacctggtccgacctcgccggcctcaactatgacctcttcgatccgaccaagagcctggtgagcaacgacttccagcatgaagtccgctggatcggcaacccctatgcccacaatggcttgcgcgacttcgacaagctgccgctggacaaggccgacgccgggcagcaggtagcccaggccggacgacccgcgccaacgacgccgcgcgcaccgtcccgccagccgaacgaaggctgaccgccgccaaggaatgcgccccgccgaacggggcgtttttccatccgtagcgccctcagggcaagaccaggttgccctgctcgtcgaacggccagaacgggttgtaggcaatttcccaaaggtgtccatccgggtcggcgacatatccggagtagccaccccagaacacttcctgcggcatcttggtcgcctgcccgccggccgccgtagctgcggagaacagacggtccacctcatcccgcgaggcgcagttgcaggccagggtgatagccgcgaagccggtcggacgatcttccacctgcgcatcctcggcgagggcgctgcgtccgtagaggccgaggaccaggttgcggcccttgagaaataccacctgctcgttgccgtccgaagagggctgccagcccagcgcctggtagtagagagaggagcgggccagatcggcgaccccgagggtcaccagggaaacaccattgcctgtcatgtcggcgtccttgtcatgggttgtcgaacaaggctgacacgagcgccgcgaggcttccagagcgacatgaaaaagccccgccgaggcggggctcttcgtagcagaggcgactgcgctagaggtagaacgccttcagcggcgggaagccgttgaactccaccgcactgtagctggtggtgtaggcgccggtagacagccagtaaaggcggtcgccgctcgccaggttcagcggcaggccatacttgtagtgctcgtacatgatgtcggcgctgtcgcaggtcgggccggcgatcaccacctcttccatctcgccctgcttctcggtccagatcgggaacttgatcgactcgtccatggtttcgatcagtccggagaacttgccgacgtcggcatagacccagcgctccacggcggtccgcgacttgcgggcgaccagcaccacttcgctgaccaggatgccggcattggcgatcagcgaacggcccggctcgaggatgatttccggcaggtcgtcgccgaagtcctccttgaggaagcggatgatctcctccgcataggtttccaggtcgttggtcttggtgatgtagttggccgggaagccgccgcccatgttgatcatcttcaggacgatgccgtcttcttccttcaggcgctcgaagatcaccttgaccttggcgatcgccgcgtcccacaccgagatgtcgcgctgctgcgaaccgacgtggaaggaaatgccgtagggctccaggcccagctggcgggccaggatcagcaggtccatggccatgtcggtctggcagccgaacttgcgcgacaacggccagtctgcggtagtcgagccctcggtgaggatacgcacgtagaccttggcgccgggagcggccttggcgatgttgcgcaggtcggcttcggagtcggtggcgaacaggcgcacgcccttctcgtagaagtagcggatgtccttggatttcttgatggtgttgccgtagctgatgcgctccggaccgacgccggtcttcatcaccttgtccagttcgtagatcgaggcgatatcgaagttcgaacccttgtcgcgcagcagctcggtgatttcggtagcgggattggccttcaccgcgtagtagatcctggcgaaggggaagcagtcggtcagttggtcgtaggcatcggcgatggtctgcttgtcgatgaccacgaagggggtttcctgcttgtcggcgaaggccttcatgcgctggaaggtttcaggggcgaaataatcctcgaccttgatggacatggttgggactcccaatggcaaaacacatggattcgtaggggtgaagctgaacgtctaatccgtttccccactttggttcgcctacttcccaaggcatgtcgccgagtatcacctgcctgccggcagccaccgcctgttcatcctggtaggtcgcgcgcgtgtcccgcgcgacgacctggccgcttgagcagcggacgtcgccttgccacaaggcgatctctcgtcgtcagtacttgagccggatggatcgtttccagcatggacgttcgggcgcgaactttaggaccaaggggacgcgagatcaataaaaaaatgccgcgatttcgcctccgcctgtcgcaccgccggattgacctgctcagcctttaccccatgtgcatgacagtggaatgtccccgtccgcccagcgttcaatcggatggacgaaaaacgtcccgcgcaggccttgcgcctacacccggaacgcgccgatcaggcgtttcagctgggtcacctgggcgcccagttcgcggctggcccgttcggtctggctggcgccttccgcggtgcgctcgccggcctggttgatctcgacgatgttctggtcgatatcgtgggccacggcggtctgttgctcggcggcggcggcgatctgctggttctggtcgacgatcatgcccaccgcgccgaggatattctccagtgcctgctgcacctgcgccgactcgttgaccgtgccatcggcggtatggtggctgctgcccatcgccttcaccgccgcatcgacgccgccctgcaggcgcaggatcatctgttcgatctcggcggtggactgctgggtgcgcttggccagcgtgcgcacctcgtcggccaccaccgcgaaaccgcgcccctgctccccggcacgagcggcctcgatcgccgcattgagcgccagcaggttggtctgttcggcgatgcccttgatcacatccagcacctggctgatcgaggcgctgtcactggccaggcgattgatcgccgccaccgactggtcgatctcgccggccaggcgctggatgctacccacctgcgactcgaccaggctgcgcccgctgagggtttcctggttcacgctgttcgcgctgctcaccgccatcgccgcgctgcgcgccacttcctgggcggtagcggccatctggttcatcgccgtggccacctgctcgatctggctgcgttgcccggctaccgcctggttgctttcggccgacaccgactcgacgcgcagggtctgccgctcgacctcgccgacggtctggctgacccgctcgatcaggtcgtggatcttcgccaccgattcgttgaacgattgtcccagctcgcccagctcgtcacggctgcgggcctggaagctgaccgtcatgtcgccgccggcgacgcgctccatcattcgcccgagatccttcagggtggcgcgggtggaaacgtagaaaccgccgtagaggtataggatcgcggcgaaaaccacggccagcgcggcgactagcaacagcatctgcgtgcgcacctgttgcaggcgcttttgcaactgggtatcgagatagccgagaacggcgtcgtcgagctggtaggtcttgtccatcgccgcgctgacctgatcgtagaactgcgtccacggggtatccagcgtctcggccacgatcacccggtcctcgaacaactgcccctggctcttcagggtctcgcgactggcctgggcggcctcctcgagcagctgtgggctgccggccagggactcctgcagcttcaggccatactcgccatgcagtttctcgaactccagcagcagttcgtcgagccgcgcgctggaggacgaattgaggaaaccctggcccagggagtaggcgccgatggcgcgccccttgctgatggccgccgtcacctccggcgttatcgagccgaccagctcgctgagctggcgcacctggcgctggctgtcctggctgagcccggcctgggcgatgagcaacttgatgaatacctgtgcgctaccgagcagcttctccgcccgtgcgcccttgccctgcagggacccttcggcctccacggcctgcaagccgttgagcaaccggtcgcgctgggcctcgaattcggctaccgccgcaccatcctcgctgagcggcgccagcgcctcgagccgcccgcgcagccccttctggacgtccgcgatgcgcgcttccagatcgccggccttgccggactggccgatgaccgcattgatctgcaacagatcgttgagggactccaggctacgccggatctgaagtccgctacccagcagcgtcaagctctgcagttcgatccgggtgtcgctgaactggcgataggcatcgcgcaccagatagaagctggtgatcagcagcggcaggaagaacagcacgctgatcaggccgaacttcatgccgaagctgagccggttcatcagcgcgatggcgggatagagtacggtcttcacccagacgtctcctgattgttcttatcgttctgagagatgccgccgcgtggcgacattgacgcacggagtccgctcggtaatggcctttcgaaatcatgcggacacgttcacctgtgtacccgatatcggcctggtgttctgtaacttaaggttaacggggaatcgcaggcggattccccgtcgctgcgctcagaggaacagcgcgcagaaggcgaacacggcgtaccagagcacggccgcgcgcaccagcaattgccagagcgcatccaggctggcgacgccggcggcacccagttcgaccgcttcgacatcgctggcgacccgtccggccttgcccagcagcgcggccgccgagatgtcccaggccagcagccagtgcagcagcacgcggataaccgcgaggaagttgccgaccagggcgaagctcagcaccagcgcacgcaccggcaaccagtcgaggatatgccggacgcgcgccgcctgttcgcgcaacgccggctggcgggcgtgctccagcgccagtgccagcaggcgataggccagggccgccaccgggccgagcaaggcataccagaagatcactgcgaagaagctctggtagccctgccagagcagatggccgtgcacccggccgatcagttcgctctcgctgccgcccaggatccccagatcgcgttcggcgacatggaaggcagcctgggcctcctcgcgccgccaggcgtcgcggaacggcccgaggtcggccatgacgtcgccgcggccgagactgtagaccaccaccagaagatgcagcggaagactcagccagccataggccagcggctgcagcaatgtcagcagcagggccagcggcagcaacggcaggactaccgcgagcagcagccccagccaggagcggcgggacaccgagggcaggtcctcgaccaggctcagccaggcgagccaggcgccatcgcgctggatacgccggcgccagccggagaacttctccagcgcaagggccagcagcaacaccaggaacgtcatgtttcctccttggaataggtcaatccggcgcggtagcgcgaccagtcgaaagcctcgccgggatcggtcttgcgctccggggcgatatcgcagtggccctggatgcgttccggggtgatcgccgggaaggccgcgcgcaacagccgcgtcagcccggccagggcagtgtactgcgcgtccgtgtacggttccgtgtcggtcccctccagttcgatgccaagggagaagtcgttgcacgcctcgcgaccgtcgaagcaggaaaccccggcatgccaggcgcggtcgtgacaggagacgaactgggtgatggcgccgtcgcgttcgatgaggaaatgcgcggaaaccgtcaggtggcggatctcctcgaaatagggatgttcgttcgggtccaggcgattctggaagaacgcctggaccttgccggtgccgaactgtcccggcggcaggctgatattgtggatgaccagcagcgacaccgcgtccccttgcggacgcaggttgaaattcggtgaagggcagtggcggacgccacggacccagccggtaacggaatcgaaatgcatacgggctcctgaacgagcccccactctaatccagcggcgccggaatgacgatcaggcgggctctggatcggccgcttcgacatgcttcgaggaaaggtattacccgcaagaacgaaaagacccggcatccgccgggtcctcgagaagcggctaggcgcccttgaggcgccgcaggttgccgatcaccgactccagggcccggtcgaacagcaaggcatcgtccagcaggcgtaccgcctgccggcgaaactccaccgccaggcccatgcgggtcttttccaggaccttcatcccggtgcgattgacgaagatgtagcgaccggtgggccggatcactgccgccagcttgcagcgcagcttgtgctcggcgtcctcctggatctccacccaactgccgacacgcagcgcatcgacccgcagcagtgcctcgtcgttgtccggcaggcgtacttcgctctcgacaggcgccggggcggcgtccggcgaggtcaggacgatttcctcgaccacccgcagcatgaccggcgcccggggcttttccgcggccgtgcccggggtcgcttcgtcgagcagggggctgtccgcgaccgccgcctcgccgcgcttgtcgcgctgcaggccctggacatgcagggtttccagctggctgaagaattcaccggtggaaaacggatcgaaggctgcgcaggccaatccctcgcgcagcgccttgagcaggcctggcacgcgctccagcaactgttggcgggacagcggatcatcatgcgggccgacgctccagatcagctcgtccatggtatccagggcctcccgccactcggccgaagccttgccatgcttgaggcagatcagcagcatcaccttgctccaggcatcccgcagcaggcgcaccaccacctccggcaggaccttgccgagcagtcgctggttcagcacctgctccacgtcctgccgtgccagttcggccttggcgcggccttcctcggcgtcgcgggtgcgttgctcgaggagctcgctgcggcggcgctcgtcgccggtgaaggcaatgaagtcctccagcaactcggcgaagatcgccgggtcgtcgacgaagtcgttcaacagccgcatcacgacctgttcgatcttctggtacaggctgtcgcgccgggcatcattgtgttcggcccagcccagcgacgcggatgcgatctcgttgagcaggcgacgcgccggatggctaccgcggctgaagaaggtcttgtcgagcagggccaccttgagcatcgggatctgcatccgaccgatcagggccttcagcgaatcaggcagggtgcggtcgtcgagaatgaactcgaacagcatcgacaccaggttgatgacgtcatcgtccacctggccgaccacccgagaacggccgctcttgtggctgacccgctggagcagttggtcgaccccgtcgcggacgtcgaactccgcggcgccagggcccggcaagtgctgttgcaggtgggaaagcaggcgcatcaggtcgttgctggaaatcggcgcggcattctcaggcgtttcgcgacggtagaaggaaggattgtcgcggacctgcgccagcagttcctgcagcgcgccgaagacttcctgctggccgccgtcgagcagcgcagcctgtgcctgcagggtcccggcatcgcgtaccgcttcgggacggacagcgggctgacgccgcggcagcgcggatttgagttccggcagcacgcccgcagcgaccaggatctggttggcctcggcgtacaactggtcgcaatgggccaggacgtacttctcgaacagcttgagaatgatcagcttgaccttgatctcgacgccgagcccctggcaggcatcgaggaaagccgcggtcagcggacgcggagcgaggggattgctcttctcgtcgaccttccggccgaccagggtgttcaggcgggtgctcaggtgggccagcgcggtggcatcgcggctcatcacccgcgccaccatcgcgtccaccgcgacggactcctccagttcctcgttctgtaccaggctgaggctgtcgaaggacacggtatccagggtcggcacggatttgccggactgtacctggttgagcgccgagaactcctcgaagaccttctgcaggtagacccgctcgatactcttgcgcttgaggcgcaggtcgcgcatggcttcgaagaaagcgttctgttcgaggttgctggtggctcggtcggccatttcgaagagggtgtcgtcggcgttgtcgaacaacgcctgcaacgcctgtttcagctgcaacgccgccttgtcgcgcacctgcacgaggatgaccggcaggcgccccgctccggcgttcggcgacggctcggaagcgaccctggtcaggtgcaccacattggcatcgttctgcatcgggactctcctgccaccctcgcggccgcgcatggaatggcaaaaatcgggcacagaggatcgattggcgtcgtccgtaacgtcaatttccaggcgtcaaaaacaagtatctacattcattatagagatactttcaaatctagatagagggttttcctatagacatgactctcttcacacaagcgaaggccgatgaatggcggccgtcccgaccggcgcccaggcaggcacagacgccgtccgctgcgctccgtataatcgcccgatctcgtacaggagcccgccatgcctaacctcacccttgccgacctccaaggcgaaatccaggccaacgtccgcaccgccctggcggaagacgtcggcggcggcgaccttaccgctcagttgatcgatccacagcgcgaggccgaggcccgggtgattacccgcgagcacgcgacgatcgcgggccgcgcctgggtcgacgaggtcttccgccaggtcgatccccgagtgctggtgacctggcaggtggaggacggccagcgagtcgagccgaaccagatgctgctccagctaaaaggtccggcccgcgcgctgctcaccggcgagcgcagcgcgctgaacttcctccagctgctttccggtaccgccacccgtagccagcactacgccgacctggtcgccggcaccacggtgaagctgctcgacacgcgcaagaccctgcccggcctgcgcctcgcgcagaagtacgcggtcacctgcggcggttgccacaaccatcgcatcggcctctacgatgccttcctgatcaaggaaaaccacatcgccgcctgcggcggtatcgaccgggcaatcgccgaggcccggcgcatagcacccggcaagccggtggaagtggaagtggagaacctcgatgaactgcgccaggcgctggaggccggtgccgatatcgtcatgctcgacgaactcagcctggacgacatgcgcaccgccgtcgccctcactgccggccgtgccaagctggaagcttccggcggaatcaacgagggcaccctgcgcaacatcgccgagaccggcgtcgactacatctccatcggcaccctgaccaaggatgtcagggccgtcgacctgtccatgcgcctcaccctctgaacgaatcgcaggcgaaaaaaagccccgccgaagcggggcttttttatgcgactggtgccggatagaggaatcgaacccccgaccttctcattacgaatgagctgctctaccgactgagctaatccggcggcggcgagcaaactaccaccctgcagccaagcaaatcaagtcgcagcatcactcttgcggaagtcaaagaaaaaacggcgagctttatcgaaacagatcgttcccgtttcgtaggcactttcaatatccagacgaatacaacctggcccaacggagtgagcattcctccccactatccgctcaacttgccctgccaccaccggcaatgtcttgtagcgctccaattgggtctgtagcggtcgtccatcgagcattccttttacatgcagttcaagaaactcggttttctccgcaggcaagtcgatataaaaatactcaggagaaaacactttaaacctcatcaactcttcagaagaaaggccagcctgcagataagacgccctattcaacacatgaaacgtatcaaacacatgaacaagagcaagcggcctcgcctgatagacaacataaactcccgccgacaggcaggaaaactgtaatagagcaatgacacccaagtcacgcactaactccatggctggctttctcatatcatagacaaccagagtcaacaatggccccaaaaccatgtcgacagcggcaacgatgcgcaccccctgccatcctcctgctatttcgaacaaagcaccgggataccaccacaaacagatgattgccagcaatacgataaaaattgccagactaatgagtagatggataaaaaaggctctccaacgacttccagcgaaatgcactataaccactctcccacataaaaaaagcccctcttaggaggggctcttttcagcattagcctattagcggcattcgctaggagcgaaacgagccggcagggtacctgcagtcagggcaggcatattgcggtcggtaccactggaaaccgcgttggagtccgatgcacaaccccagtcaatagagccagtcacaccggaagcataactggcacccaattgagtcggggcaccggcagcattctgcacatagggagtaaataccagggtagagttagccggaatattacccacgtttgcggcattgaaagtaacagtgatttcaccagtcgcctctgcaatttgtacagaggtcacatacttactggtagcaccggcgttaccggcttgagcattccagacccttgccgaagcggctagctcaccggcagtggcagagctatcgccaataagcgtcttggcgctggcagccaagccaaccccctctgtcacgcgagcacgaatggtgtaatcctgatatgccggcaaagcgacggcagcaagaataccgatgatcgcaaccacgatcatcagttcgatcaaggtaaagcctttctgagctgtcatgtatctctccattgatatatccaggcctaacgcctgacgaccataaagcatcttgcatgccaacctgaaaactccatagctacgaagccggtgcagcctctcccctccagcggcagccccacaaaccgacaatatgtgacacttttcggcagtccgaccttctcggtttggcagccctcctcttctgcgttataaggcagcatatctagccttatgcgaccactcccaatgaacgacacaattcaactcagcggcttggctcgccagctcgtcctgcatgaacttctcgatgaaaaggccgcccaacaggcccaatcgcaggcccagcgcaacaagttgtcgctggtaacctatctggtacagagcaagctagtgaaagggcaggccttgatcgaactggctgcggatcaattcggtatcgcctactgcgacctgaacagccttgagcgggacagtctgcccaaggatctgatcagcgagaagctggtgcgccagcatcgagtagttccgttgtggcgacgtggcaacaagctgttcgtcggcatctccgatccagccaaccaccaggcgattaacgatgtgcagttcagcacaggcctgactactgaagccatcctggtcgaggatgacaagctcggcatcatcatcgagaaactattcgaaaatgccactgacagccttgcaggactggacgacgtggatctggaaggcctggatgtcggttccggtgcgggcgcaagccaggatgatgattccagtgcagagacagacgacgccccggtggtgcgtttcgtcaacaaaatgttgttggatgcgatcagaggcggctcctccgacctgcatttcgagccctatgaaaagatttaccgcgtacgtttccgcaccgatggcatgctccatgaagtagccaagccgccgatccagttggccagccgtatttccgcgcgactcaaggtgatggccggcctggatatctccgaacggcgcaagccgcaggacgggcggatcaagatgcgcgtgtcgaagaccaagtccatcgacttccgcgtcaacaccctgccgaccctgtggggcgagaagatcgtgatgcgtatcctcgattcctccagcgcgcagatgggcatcgacgccctcggctacgaggaagaccagaaggaactctacctggctgcgctcaagcagccgcagggcatgatcctggtcaccgggcccaccggctcgggcaagacggtctccctgtacaccggcctgaacatcctcaacaccaccgacatcaacatctccactgccgaagacccggtggagatcaacttggaaggcatcaaccaggtcaacgtcaatccgcgccagggcatggacttctcccaggcgctgcgcgccttcctgcgccaggacccggacgtgatcatggtcggcgagattcgcgacctggagacggccgagatcgccatcaaggcggcgcagaccgggcatatggtgatgtccaccctgcacaccaacagcgccgccgagaccctgacccgcctgctgaacatgggcgtgccagcgttcaacctggcgacctcggtgaacctgatcatcgcccagcgacttgcgcgaaaactctgctcgcactgcaagaaagagcatgaggtaccgaaggaaacactcctccatgaaggcttccccgaggatcggatcggcaccttcaagctgtattcaccagtaggctgcgaccattgcaagaacggttacaagggccgtgtcggtatttatgaagtggttaaaaacaccccggccctgcagcggattatcatggaggaaggcaactccatcgagatcgccgagcaagcccgcaaagaaggcttcaacgatctgcgcacctcaggcctgctgaaagccatgcaggggatcaccagcctggaggaagtcaaccgcgtgaccaaggactaatccatggcggacaaagcgttaaagaccagtgtcttcatctgggaaggcactgataagaaaggcagcaaggtcaaaggagagttggccgggcaaaaccctatgctggtgaaggctcaactgcgcaaacagggtatcaacccactaaaggtccgcaagaaaggtatcaccctgtttggggcagggaagaagattaagcccatggacatcgccctgttcactcggcagatgtctaccatgatgggtgccggcgtaccgttactgcaatcttttgacatcatcggcgaaggattcgaaaatccaaacatgcgcaagctagtcgatgagatcaagcaggatgttgccgccggtaacagcttagccagttcacttcgaaagaaacccatttacttcgatgatctctactgcaacctagtcgatgctggcgaacagtccggtgctttggagacattattggatcgggtagcaacttataaagaaaagacagaatccctgaaagccaaaattaaaaaggccatgacttatcccattgcagtaattgtagtggcccttgtggtgtcggcgatccttctgataaaagtggtcccacagttccagtccgtatttgcaaattttggcgccgagttgccggcctttactcaaatggtcatcaatctttccgagattcttcaagagtggtggctcatagtgcttattggtctttttgccgcagcttttgcatttagggaagttcatcggcgctcgcaaaaactgagagattcagtagatcggggcctgctgaaactacctatcatcggcgggatactttacaaatcagctatcgcccgctacgcccgaacgctatccactacctttgcggctggagtgcctctggtagaagctctggactccgtttccggagcaactggcaacgtggtattcaagaatgccgttaccaagatcaaacaagacgtgtccagcggcatgcaattgaacttttccatgcgcaccaccaatgttttccccagtatggctatccagatggctgcaattggcgaggaatcaggttcgctagatgagatgttaggaaaagttgccggtttctatgaggaagaagtcgataacgccgtcgacaacctgacaacgttgatggagccgatgatcatggccgtgctcggcgtactggtcggcggcctgatcatcgctatgtatctaccgatcttccaactgggttccgttgtgtaaagatggaactcctcgactacctggccagccatccgctggcctttgtcttgtgcgctatcctccttggcctgctggttggcagcttcctcaacgtcgtcgtgcatcgcctgccgaagatgatggagcgcaactggaaggccgaggcccgcgaagcgctcgggctggagccggaacccaagcaggcgacctacaacctggtgctgccgaattcggcgtgcccgcgctgcggccacgagatccgcccctgggaaaacatcccgctggtcagctacctggcgctgggcggcaagtgctcgtcctgcaaggccgccatcggcaaacgctaccccctggtggaactggccaccgcgctgctttccggctacgtcgcctggcatttcggcttcacctggcaggcgggcgcgatgctcctgctgacctggggtctgctggcgatgagcctgatcgatgccgatcaccaactgctgccggacgtgctggtgctaccgctgctctggctgggcctgatcgccaaccatttcggcctcttcgccagcctcgacgatgcgctgttcggcgcggtgttcggctacctgagcctgtggtcggtgttctggctgttcaagctggtgaccggcaaggagggcatgggctacggcgacttcaagctgctggccatgctcggtgcctggggcggctggcagatcctgccgctgaccatcctgctgtcgtcgctggtcggggcgatcctcggggtgatcatgctgcgcctgcgcaacgccgaaagcggcacgccgatccctttcggtccctatctggcgattgccgggtggattgctttgctctggggtgatcaaataacccggacctatctgcaattcgccggattcaaatgacccaaccctggatactaggcctcacgggcggtatcggcagcggcaagagcgcagccgccgagcatttcatttccctcggcgtccacctggtggacgccgaccatgccgcccgctgggtggtggagccggggcgtccggccctggcgaagatcgtcgaacgcttcggcgacggcatcctcctgcccgatggccagctcgaccgcgccgccttgcgcgagcggatcttccaggcgccggaggaacggcgctggctggagcaattgctgcacccgctgatcggcgcggagatcgtccagtacctggccagggccgaatcgccctatgccatcctggtctcgccgctgctggtggagtccggccagcgccagatgacccaccgcgtgctggtggtggataccccggaacatctgcaactacagcgcaccatgcttcgcgacaaggtctccgaggagcaggtgcgctcgatcctccaggcccaggcccggcgcgacgagcgcttgaagcacgccgacgacgtgctggtcaacgacggcgacctgtcccacctgcagcgtgaagtcgagcgactgcacgccttctacctgaccttgcgaggaggccgagcatgagccagcccctgaccgtggagtgcccgacctgcggcgcgcccgtcgaatggaaaagcgacaacaagtaccgccccttctgctccgaccgctgcaagctgatcgatctcggcgcctgggccgccgaggaacatgcgatccccggcgacaccctggaagacgacatcttctccgccgacctgccgcctcgcgagcattgaacgcaacgggccagccaatccggctggcccgttccttcaggggcgcatgaaagcgtagtcgcgctggtcgtcgagattctccgcaagaaactgcagttcgctggccaggtcgccagcatcgcgctccgcccggttcagttcgacgattgcgctgagcaacgcgcgcaggcgcattgcccggtccgcctcgtcgctcttcgacagcaactctcgcaggccctctcgggcccattcatggacacccatgttccgctcctcacctgggaaaacggcaggatcgcggccggcttcgtccgaaacactgacgcaagtcagccgccgcccgccatgaacctggcgaatgactggtcatcagggcttgcgctcttcgtccttccagggcgcctgcaggtagcgcgtgcgattgaaggtttccagccactccgggtagtagaccaccaggccggtgatcaccgtgccgttgatgaaggcctcggggaacatgatcagccacaggtaaccggcgaagtcctccagccagggcggcatcgggaaaaggccgtcgatccagaccacgccaaggccgagcagcaggaccaccaccgcggtgagggccgccgggaagaaaccgcagcagaagatgtagacgaacaggttgcgcggctggcgcttttccacgaacaacgccgccagctccgcgatcagcgcggggatcgccaccagcagcacgccgttgacgccgatcgccagccaatcctggcggccgagcaggcacaagcccagttgcgccaccagccccaccacgatcgccagcggccagtcgagcagcaaggtgacggcggtcatgccgatgaaatggaaggacagccccgattcgaagtcccggcgcaccagccagagcaggaacagcccgagcatggtaccgaacaccaggtgctggcggcgggtatcgctgaccagctcgacccagggcgcgcgccaggcggcgagcagcagcaccggcgcatagatggcccagcccagttccaggctttccgccgacagcaattcggcagcgatcacggctgcagttgttccagggcgatgcgcagggccaccggcgaatccaactggcgggtttccaacacgcggcgctgctccagcctgacccagaggaccttgccctcgtccgaggcatagcgagaagcgatggccgcgtcgcgatcgagcagcaccggataactgtagtcacgcatggccggcaccgcgaaaagccgggaaatcagcgccggcatgcggctgatgtccgccaggaacagcgcgtggcgcgcctccaggtagccctttgggcgttccgccagcgccgccttgaccagcttcgagccgtccatgtcccgcgccaccagcaggacccgggtggagtcgtccagcgagtgcgccttttcgaactggtcctgcaacgtccagggctccagagtggagcccttctccacggccagcgccaggccgggcagcagcatggccagcagaacccaatgcaatcgtttcacgcgtgtccctcccgagtggaaaatacctggatgtccttgcgccgctcccagtccgactgggctcgccagaatgcctgggcctcctcggcggcatccaagacgaagacatgggatttgccgatcccctccctcgccagacgcgccaacacctcgtcgagcatccgccgcgcgagccccagccctcgataaccgggatcgaccaccaggtgctggaggtaaccacggcgaccgtcatgcccggccatcaggcaggcgatcacctccccttcggtttcgaccagcaggctcagcccggggttgcgttgaaggtaggcgaggaagaagggataggcgtcctccgcacggaggcggatacctggcgttcgcgaccacagcgcgaagagtgccgggtgatcggcggcgatgacgctgcgaagttgcatcggaacggctccggcccaaggggaacggcagtgtacaccgagcctcgccgctggcgcgctccgggacggattgtcgcagccggagcgcctgcgggctggaaagcgggcccgccggcagactaagctgagcccatgaacgaagcggattatctgcgcctgctcacccgtcaggccgaacaagccaacgacttcctctccaacgcacgtaaatgggaccgcgagcgctgggtctgccagcgcttcctcgaagccctcaacgtgccctatcgccaggaggatttcgccgcccccggggaacagccgccggacgtcctgttcaagggtgccggcttcgaggtgttcttcgtcctcgatgaaggtcgccggctgaacgaggagtggcgcgaggaactgacccgtcgccgccaggccgtcagcctgcgccaactgatccgacgcgaagagcggccacaacggatcgccgccgccgagctgcaggcacgactggcgccaaccctgcgcaagaaggcgcacaactatagcgagcgcggcatcgaccacggcgaactggacctgctggccttcgtcaacctgaagcgcgcggtgcccgatttcaatacgcccttcccgccgcccaccgaatacctgcgccaaggctggcgctctctgtcgatggtcggtccgacctttgcccgggtgctcttcgctcactccggcgcccccgaattcctgcgcgccaacctcggccgcagcatcctgttcgacgccggggtaggcctgtgagcgaagggcgggtgaagtggatcggcgtgcgctccggcagccgcgcgccgatccaggaactggaggcggtggaggcacggcgcggcctgggactgacaggcgaccacccgcacccgccgcgccaggtcaccctggtgcagtgggaacacatcgaggccctcggtaccctgctgggcaggccgctgttgcccaacgagatgcgccgcaacatcgccgtcgccggcatcaacctgctcagcctgaaggaccgtcgcttccgcctcggcggcgcgctgctggaaaccactggctggtaccaaccctgcggacgcctggaaaagcacatcgaccaccgcacactgaagagcgtgcgcgaacagggcggcatcaccgcgcgggtgatcggcagcggagtgatccgcctcgacgatccgctggtgatcgagccccctgtctgtctagaatgaccgacatcgaaaacggaggcctgccatgtccagccgactgagccccgaagaccagcagaaggtcgagcagtacctcgcctcgccgctgcaccagatcgagcgtgcgccgttccgcccgtggttcctgatgttcgtcctgctcgccgtggtcatcggcctgggcctgctcagccgcctcctcagctacctggcctgagtcgtccggtcgagccacgctcccgacgaccgcctcacggaattcccactatgagatatccacatgtcccatcgcatcgtgatcgtcggcggcggcgccggcgggctggagctcgccacccgtctcggccgcaccctgggtaaacgcggcaaggcccaggtcaccctggtcgacgccaacctcacccacatctggaaacccctgctgcacgaagtcgctgccggctcgctcaactcctccgaggacgagctgaactacgtcgcccaggcgaagtggaaccacttcgaattccagctcggccgcatgcagggcctggatcgcgccggcaagcgggtccgcctggccgcactggtggacgagaatggcgttgaactggttcccgagcgcgacatcgcctacgacaccctggtgatcgctgtcggcagcaccaccaacgacttcggcaccgagggcgctgcggaacattgcattttcctcgatacccgcgcccaggccgaacgcttccaccgacaactactcggccagtacctgcgtgcgcataccgggcacgacgcgaacaacaacgcagtgagtatcgccatcatcggcgccggcgccaccggcgtcgaactggctgcggaactgcaccacgccgcgcagatgctggccgcctacgggctcgaccggatccgcccggaagacctgcacatcagcctggtcgaagccggcccgcgggtgctgccggcgctgcccgagcgtatcagccagccggtacaccagaccctgagcaagctcggcgtacgggtgatgacaggctccgcggtgagcaaggtagatgcggacggcctctggaccggcgacggcgaattcgtcccggcgacgctcaaggtgtgggcggcgggcatccgggctccggccttcctcaaggaactcgacggcctggaaagcaaccgtatcaaccaactggtggtccgcccgaccctgcagaccacccgcgacgacgacatcttcgccttcggcgactgcgccgcctgtccccagccggcgcaaccgggagagcaaccgcgcaacgtgccgccacgcgcccaggccgcgcaccagcaggcctcgctgctggtgaaatcgctgcgtgcccgtctcgaaggcaagccgctgggcgaatatcactaccgcgactacggttcgctgatctcgctgtcgcgcttcagcgcggtcggcaacctgatgggcaatctgatgggtagcgtcatgctcgaaggctggctggcgcggatgttctacgtatcgctataccgcatgcaccagatggcgttgtacggtccgctgcgcaccgcgatgctgatgcttagcggccgcctgcgcagcaccgagccacgcctcaagctgcactgagccattacgccccgtttgccgtcggcgcggggcgttccttcaacagcgaagctggcgcaactgcgccagccgactggcggtacgctgcatgtccgcaggcaggtcgctgccctcgaccaggtccggcagcgccttttcggcactcaggaaaaaacgccggtcattgtcgtaaaggacgtcgacgagattgatgaagcgctgctgggcggcgaccgaacagcgcgccatcggcggtacgccctccagcacccaggtagagaagcgttcgccgagggcaaggtagtccatcaccgcggttggcgcctcgcaaaggtcggcgaaggcgaaccacaccaggtcgccgcacaccgcgcgcgcctgcaacgtcctcgcgccgctttgcagggtcacgcgttgcgagggctcgggcgcggacaagcccagctcgtccaggcaagcgcatgaggctggccagcaatacccgccgctggcataaccggaagcgatctcctgccgcggcgaaatcgtccggtagtcccgggcgccggctacttccagcacttccatgcgcgtctcgatcaaccggatcgccggcaggaagcgttcgtggtagagcggattgggcagcagttgccgcggcgcgtagttggaggtgcagaccagggtgatcttcctgcggaacagctccctgaacaggcgtgttatcagcatcgcgtcgccaatgtcgtggacatggaattcgtcgaagcaaagcagccggcagtctcctagcagttcgtcgagcgcaccgcccagggcatcgggccgcccctggcggcggaacataccgtcatgaagccggcgaaagaacgcatggaaatgcgtccggcgcaggccctgcaaatcggcgctgcgaaagaagccatccatcagccagctcttgccgcgcccgaccggcccccacaggtagaggctgcgcggcgcttgccggaatagcgacggacctcgacgcaagcgctccgccaatcgatcgagatgaagaatggcattgccctgggctgcgtccagcacatagccgcgccgttgcgcctcttggtggaaatagcgggctacgggcgttgtgggcttggtgccggtcatgggtgaacgccacgaaaaagaaccgaaagacacactccgttgatgctcagcctgagagggcccttaaaccgagaacggcattctagcgctgcgtcctgcccatgctccagccgccagaccgaacggcgggcgatagtcggacaggccctttgatcatgaccgccacggtcgcgatacggaatcgcgctcagccgctacttccgccccactgtttccgccgcttccgctgccgagcccattatcaccggagtttttcctacagcagtcctcccagtcccctacgaaaaccaagaagttctaccggccaaagccagaaaactacgattgtcgccgtttcagcctcgcctcaggctatcgcccactcgattctccgccttgaaaccgatcgttctgcacatgcctgcggatatcggcttcttttctctgcaagaaccgcgctccgggccgattgaccatgcatccagcttttccgcgtaaccaggctagcctttctttcccacctccctctccaaaaccttccggcagttccacttcgattgttccatccctcagggccggaccgctgctccgtacgggcctcatgggaatggccatgttgtcgtcctgccttgccaatgccgccccggatgcggggcaggcgctgcgtgacgtggaaagccgacgcctgaacctgcccgcgccggtggaactggacgccgagcgccccagccccgaggacggcgtatcacgggctgccgaagagggcggcccgacggtgctggtcaagcgcttccaactcagcggcaacaggcagttcgacgatcgatgcctgctggcgctcctgcacgacctgccgggccaggaactcaatctgagccaattgcacgccgccgccgcccgcatcggcgatttctatcaggaaaagggatatgtgctggcgcgcgccttcctcccggcacaggaaatccaggatggaacggtacgcatcgaagtgctcgagggacgctacggcaggatcgaactgcacaacacgtcccgaacgctggaccgcgttctactccgccccttgagcgcactcgaacgagataccgcggtccagggctcggagctggagcgtgcgcttctgctcctgagcgacattcccggcctccaggccaaaggcaccctgctgccgggccaggcgcagggaaccacggacttgcgcgtcgaggcccgccccggcccgctggtcggcggcaggctggaggcagacaactatggcggccgctacatgggggaatatcgcctgggaaccaccctcgacttcaacagcccgctgcgactgggcgaccaggcgagactgagcctgctgggcagcgaccggcaccaacgctactaccgtgcagcctatcaactgccccttggttcccgaggcacgcgcatcggactggcccacgccgagacgacctatcgactggtacgcgatttctcgcgcctggacgcccatggccgggccattaccgacagtctgttcgtcagccagcccctgctgcgtagccgcagcttaagcctgtccacccagttgcaatatgaaaacaagcgacttcgcgatgaccaggagcgtaccgggaggcatagccgcaaggagatccgcctgtggaccgccagcatcagcggaaacgcccaggaccgcttgttcggcggtggacagagcggcttctcgctggcctatgcccacggccagctcgccatcgactccggcgaagagcggctgctggaccgctacaccatcggtaccgccggcagcttcgacaagatcatgctcaacgccgtacgcctgcagcacctgggcgaccgcctgcagttgttcgcccaactcaacgcccagtggagcggcggcaacctcgacagcgcggaacagttcgacatgggcggcccctacggcgttcgggcgttccccctgggcagctacaagggctacggcgacgaaggctggcaagccagtgcggagctgcgctacagcctggctccgggctggcagctgagttcgttcgtcgaccagggcgcggtgaaattcctcaagcaccccaacaccacggaaggcaatcgcaaccgcatggccgccgtcggcagcggcgcaacctggtacggaacggatcaccaggtcagcctgaccgccgcctggcccctgagccaggaaaacaacatcgagcccgagcgcactccccggctgtggttgcaagcgacccgctacttctgagcaagctcccgcccgccatgccggcgggccccactgaaaggaaaagccatgaacaagagctatacgctggtctggaaccaggccacaggctgttggaacgtcgcaagcgaaggtacccgtcggcgcagcaagagcggacgcggcaaggcgctcgtagtcgccggagcgtcactgctcggcctgttctgccaggcccccgccttcgccctgcccagcggcgccacggtcgtttcaggcgatgccggattccagacatccaccgatggccggcatatggtcatcgaccagcagagccacaagctgatcaccaattggaacgagttcagcgtccgtgccgatgagcgggtcagcttccaccagccgggccaggacgccgtcgccctgaaccgggtgatcggccgcaacggcagcgatatccaggggcggatagatgccaacggcaaggtcttcctggtcaatcccaacggcgtggtcttcggcaagtccgcccaggtcaatgtaggcggcctggtggcttccaccctggacctggccgacagggacttcctcgccggcaactaccagttctccggcgactccggcgcaaccgtaagcaatgccggcagcctgcaagccagcgaaggcggcagcatcgccctgctgggcgcccgggtcagcaacgacggcgtgatccaggcgcaactcggcgacgtggccctgggcgcaggccagggcatcaacctcaatttcgacggcgacggcctgctcaacctgcaggtggacaagggctcggtcgacgctctcgcacacaacggcggcctcatccgcgccgatggcggccaggtgctgatgagcgcccgcagcgccgacagcctgctcaagaccgtcgtcaacaaccagggcactctcgaggccaggacgctacgcagcgcggaaggacgcatcgtcctcgacggcggcgaacaggggaccgtgcgggtggccggcaagcaggacgccagcgccatcggcggaggcaatggcggcctggtgctgaaccagggcgcgaacgtcgagatacagcgaaccgcgcaggtggacacccatgccgaccagggcgcaaccggcacctggaggattctctcgcacgaggtcagcgtagccgctgtcggccaggcaaacgctgccggtgatggttccggccaggtccatgtagcgcagggcccagccggggccaatgcgtccgatagcaacggcgtgaccatcgttcagcagcagccggccgtcgacctcgccgccggcgccaacggtacctccgcagtgcagagccagagcggcgccaacatcggctcgggcgccaatggcatcagcgtcgtgcaaagccagaatggcgccaatatcggcgccggcgcgagtggcatcagcgtcgtgcagagccagaacagccccaatatcggctcgggcgtcaatggcgtgactgtcgtgcagagccagaacggtgccaatatcggttctggcgcaagtggcatcaccgttgtgcaaagccagaatggcgcaaatatcggttcaggcgcgagtggcatcagcgtcgtgcagagccagagcggccccagcatcggctcgggcgtcaatggcgtcacaatcgtgcagagccagagcggtgccaacatcggccccggcgtcagcggaatcgatgtcgtccagacccagactctccccaacctgagcccaggcgccaatggctccagcatcgtccaggtccagacgctacccgatatcgccgccgacgccggcaatgtgcatgtcgtgcaggtccagaccggcggtaacaaggtcttcggcaactccgccaccaacgtcaggtcacgtaccgttcaggcccggagcaacgagaatgtcggttccggcctggcgaatccaagcagcgcgggaaaaggcccgacgttgcatgccgataccctggcccgcaacctttccacaagcaacgtcgaagtggtcgccacccggggcaacgcgcatgtcggcgcgccgctgtcctgggacagcggcaacggcctgacgctaaccgccgagcgcggggacctcaggatcaatggcgcgctgacggcccagggggaaaacgccagccttactctcaatgccgggcagcgccctctccgtatcgacgacagcctctctctcactggccagggagcccgggtcgaattcaattcggacaagggttatgccctggccgaaggcacccggatcaccctgtccggcaagaacgcaggattccgcgccaatgggcgggactacagcgtgatccaggacctgcagcagttgcgcggcatcgatagggacctgggcggcagctatgtcctcggcaatcgaatcgcaggcggcaactccagcttcctgtcgataggcaacgcgagcgccttcggcggtaccttcgacggcctgggcaacaccatcgataatctcgccgtctacggcaccggcgcctactccggcctgttcagcgtcaaccggggcaccctccgcaacctgaacctggaacgcatttccgccgatggagcacaggccacccactacaacgtccaggtcggtagcctggccgccgtcaacctcggtcgcatcgacaatgtgaacgccagcgacatccgtatcgccgcggcctcgaagctgaacagcctcggcgggctggtcgcactgaacctgggcagtatcgacaacgccagcgccagcggcacgctggtcggcaaccgccacacctatgctctgggcggactcgcagccgaaaacatcagcacagccaggggcgtggccagcatctccaacagccgggccgattttgccatctccggccagttgaaggaccatgccagccactacggcgcggggggcctggtaggcaggaaccgcggcggcctcatccgcagcagcggcagtcagggaacgctgtcgctgagcggtcacggaatgaacctgggaggactggtcggatacagctccgccggcggactggcggacgtatccgcctccgtcgacgtctcaggcaacggacagcacggcctgtacggagggctcatcggcctcaacgtaaacagtggtatcgcccacgccacggccagcggcaaggtccggggcacagacgcggaagcactgggcgggctgatcggccggaacctgaacgcggccatcaacaacgccagcgcccatggcgatgtcagcctgcaagacggtcgctacctgggaggcctgatcggccacaaccaggcaggcaatctggccaacgtcagtgccagcggcaacctgagtggtgggtcgctgctccaggccggcggcctgatcggtctcaacgccaatgcctcgctggtcaatgcctccgccaagggcaatgtcgctacccgcggagcagaagcggttggcggtctgctcggagaaaacctgtacggctccgtcatcaacggctccgccagtggcgaagtcaccgacggcagcggcaaaaccctgggtggcctgatagggtccaacctcggcggcaatcattccaacctgaaggcctccgggtgggtaaacgcaggggcgaacagtgacgtgggagggctgatcggccacaaccggggcggcaaccacagcaccctggcggcatccggcaatgtcaccgggggcaagggcagtcgcgtcggcggactcgtcggctataacgatgccgcctcgctgacgaacgtctcggcttcgggcaacgtcagcgccagtggttccagggccatcggcgggttgatcggcagtgacctgcgaggttcgctgatgctcgccagcagtcatggaatcgtgaacgacaagaccggccacaacctgggagggttggtcggccgcggtgaaaacacctcgatccgctccgccaaggccagcggtgcggtgagcggaggcgccgggatcagggccggcggactggtcggctccctggagggctggcaggctctcatcctgggggcctcggccggcggcgatgtgacggcgggctacgatagctatattggcgggctggtgggcttcagcaccgccaccatcagcggcgcttccgcttccggcaaggtcggaggctcgggtctgctgggcggcctggtcgcctggaaccaggggaatgtcatgggttcttcggccagcggcaggctggagccacaaatccccaaccagatccatggcggactgatcggcatcaattttggctggcagtcctggaactcggtatacggggctgcggcgaccgttccaatgataggtcgccactacaacctgtgaatcgattctcccggtacccgtaccgggaggcttcctgttcgatggagcggccgggcctcagggcccgccgcctccagacgctcgatgaatgccatgcgggaaggccaggcgtcggagaaacagggctggaagagcggcccctcctccttcccacaggccagcattcggaaaataagggtacagaaacgaaaaagcccaccttcgcaggtgggctttttcgtcttgaatatggtgggtcgtgtaggattcgaacctacgaccaattggttaaaagccaactgctctaccgactgagctaacgacccaagtatgaggtggtcggggtagagagattcgaactcccgacatcctgctcccaaagcaggcgcgctaccggactgcgctataccccgattggaagttggctccgcgacctggactcgaaccagggacccaatgattaacagtcatttgctctaccgactgagctatcgcggaacgtctttcttccaaccctggacgcttccggtgttgctggattcgcgtctcagaggcgcgccattttacggatgcgcgcgggcatgtcaaccctctgatccaaaaagtttttcttctttttccacgagcggcaaaacggcccttccactgcatgcggcagcgctctcgctcctaccggacgcccatgaaaaagccccgccgaagcggggctttccctgtccgtccacgaagaggtcaggcgaagacgatctcgtcgccttccaccttcgccgagatactggcacccggcgcgaatttgccggccaggatcagttgcgccagcgggttctcgatccagcgctggatggcccgcttcagcgggcgtgcgccatagaccgggtcgaagccgacggcgatcagcttgtccagcgcctcctggctcagttccaggctcagctcgcgctcggccaggcgcttgcgcaggcgaccgagctggatctcggcgatgccggcgatctgctcgcgagccagcggctcgaataccaccacttcgtcgatccggttgatgaattccggacggaagtgcgcattgaccgcgtccatcactgcggcacgttgcgcctcgcggtcgccggccagctcctggatctgtgccgaaccgaggttggaggtcatcaccaccacggtgttgcggaagtccaccgtacgcccgtgactgtcggtcaggcgtccgtcctcgagcacctggaggagaatgttgaatacatccggatgggccttctccacctcgtccagcagcaccaccgagtaaggcttgcggcggatcgcctcggtcaggtagccgccttcctcgaagccgacgtagcccggaggcgcgccgatcaggcgggccaccgagtgtttctccatgaactcggacatatcgatccgcaccagcgcctcctcggtatcgaagaggaactcggccagcgccttgcacaactcggtcttgcccaccccggtcgggccgaggaagaggaacgagccgctcggccggttcggatcggcgaggccggcgcgcgaacggcgcacggcgttggacacggcgactaccgcctcgtcctggccgatcactcgccgatgcagctcctgctccatgcgcagcagcttctcgcgctcgccctcgagcatcttcgacaccgggataccggtccacttggaaaccacttcggcgatttcctcgtcggtcaccttgttgcgcagcaactggttctcggtcttgccgtgctggtcgaccatctgcaggctgcgttccaggtccgggatggtctggtactggatgcgcgccatgctctcgaggtcgcccttgcgccgcgccgcctccatctcctgcttggcctgctcgatcttctgctggatctgcgccgagccctgcacctcggccttctcggacttccagatctcctcgaggtcggcgtattcgcgctcgagcttgacgatatcctcctccagcttggccaggcgcttcctggtggcttcgtcgtcttccttcttcagcgcctcgcgctcgatcttcagctggatcaggcgacggtcgagacgatccagttcctccggcttggagtcgatctccatgcggatgcggctggcggcctcgtcgatcaggtcgatggccttgtccggcagttgccgatcggtgatgtagcggtgcgacagcttggccgcggcgatgatcgcgccgtcggtgatgctcaccccgtggtgcacttcatagcgttccttgaggccacggaggatggcgatggtgtcttcctcgctcggttcgtccaccagcaccttctggaagcggcgctccagcgcggcatccttctcgatgtactggcgatactcgtcgagggtagtagcaccgacgcagtgcagctcgccgcgcgccagagccggcttgagcatgttgccggcgtccatggcgccttccgccttgccggcgccgaccatggtgtgcagttcgtcgatgaacaggatgacccggccttcctgcttgcccagttcgttgaggaccgccttcaggcgttcctcgaactcgccgcggaacttggcaccggcgatcagcgcccccatgtccagggccagcaggcgcttgtccttgaggccgtccggcacttcgccgttgatgatgcgctgggccaggccctcgacgatggcggtcttgccgacgccgggttcgccgatcagcaccgggttgttcttggtccgccgctgcaggacctggatggtccggcggatctcgtcgtcgcgaccgatcaccgggtcgagcttgccttcctcggcgcgcttggtcatgtcgacggtgtacttgtccagcgcctggcgcgactcctcgacgttcgggtcgttcaccgcttcgccgccacgcaggttggccacggcattctccagcgccttgcgcgacacgccctggccgagcagcagcttgccgagcctggtgttctcgtccatcgcggccagcaataccagctcgctggagatgaactggtcgcccttctgctgggccaggcggtcagcctggttgagcaggcgtgcgagatcctgggacaggttcacgtcgccggtcgggctctggatcttcggcagcgcgtcgagttctttgttgaggccgctgcgcagggcggcgatatcgaagccgacctgcatcagcaggggcttgatcgaaccgccttgctgctcgagcagggcggaaagcaggtgcaccggctcgatggccggatggtcatggccaacggccagggactgggcgtcggagagcgccagttgcagcttgctggtcaaacggtctattcgcatgggtcgtccttccttctatagagcgggccggaacgatgggtgtccctgatgaagaaaagcccgccgagatgactcagtagataagggcgattttccgcggttcaagcgaccggaccgtgacatcggtcagttgccgccggataacctgcgcgggcctagtcctggagccagaccaggctggcaaaacggccggtacgcgacgagcggcggtaggaatagaagcgcgcggtatcgctgaaggtgcagaagccaccgccatgcacggcggtgacgccatgggcgcccaggcggatccgcgcgagtcggtagatgtcggccatgaagcggcccggattggcgctaggtacgaaagccgagcgcgcctcggcgtgcgcagcgacgaatgcatcgcggacctcgccgccgacctcgaaggcctgcgggccgatcgccggccccagccagaccagcagttcgtcgccgggcacgcccaggctgtccaccgtcgcctccagcacgcccgccgccagcccgcgccagccggcatgggccgccgccacgcgggtgcccgagcggtcgcagaacaacgccggcaggcagtcggcggtcatgatcgtacaggcgacgcccggcatcgcgctccagctggcgtcggccctgagcacccggctcgggtcggcctccaccaccgtcactccgtgcacctggtccaaccagctcggccggcattccaggcgctcggtcaggcgtcggcggttttcttccacggcgcgcggatcgtcgtcgacgtgggcgccaaggttcagactgtcgaagggtgcctggctgaccccgccactgcgcgtggtcacgcaggcccgcacacgggccggcgccggccagtcgggggtcagccaggcgttcatccgacgaacgcctcgcgatcctggcgcaacaggctgagcagccagaggaagtcttccggcagcggcgactcccacttcatgcgcacgccggtggccgggtgatccagttcgaggaagcgcgcgtgcagcgcctgccgggggaactcgcgaagagtctggaccagggtctggctggccaccgggggaatcctgaagcgcccaccgtagaccggatcgccgaccaggggatagccgatatggctcatgtgcacgcggatctggtgggtacgcccggtctccagcttgacccgggtatgggtgtgcgcacggaagcgttccagcacgcggtaatggctgaccgccaccttgccggcgtcgaccaccgccatcttctgccgctgcacgccatgccgtccgatcggcgcatcgatggtgccgccggaggtgatcacgccgatcacgatcgcctcgtagatgcggctgaccgaccgtgcctgcagttgcgccaccagcttggtgtgggcctccagcgtcttggccaccaccatcaggccggtcgtgtccttgtccaggcggtggacgatcccggcgcgcggcacattggcgatgtccgggacatggtagagcaaggcattcagcagggtgccgtcctgatggccggcagccggatggaccaccaggccggcgggcttgtcgatcaccaggatgtgctcgtcctcgtagacgatttccagctcgatgtcctgtgcgagccactcgccctgggcttcctgctcggcctccaggaccagttgcgcgccgctgtggacgatgtcgcgcgggcgcagcacggcgccgtcgacggtcaggcgtccgtccttgatccagccggccagacgggagcgggagtgttcgggaaaaagctgggcggcgatctggtcgagacgctggccacccagctcgaacggcacctcggccgcgcgttgaatcatatcggacatgagtaggagacgatgctcagcgcggcttttggaatcggctacgcgctgtggttaaatacggggtctttgtcccagggggtgcctggggcgccaatcataacagacggttgaggccaagccgaccgtcccagggacgcaagccgccatgcaagtgaaacacctgctgctgatcgccatcctcgccctcaccgcagcctgctcctcgaacaaggagactgtcgacgagaacctgagcgagagccagctgtaccagcaggcgcaggacgacctcaacaacaagagctacaacagcgccgtcaccaagctgaaagccctcgaatcgcgctatcccttcggccgctacgccgagcaggcccagctcgagctgatctacgccaactacaagaacatggagcccgaagccgcccgcgccgccgccgaacgcttcatccgcctgcatccgcagcaccccaacgtcgactacgcctactacctcaagggcctgtcctccttcgaccaggaccgcggcctgctggcgcgcttcctgccgctggacatgaccaagcgcgacccgggcgccgcccgcgactccttcaacgagttcgcccagctcaccagccgcttccccaacagccgctacgccccggacgccaaggcgcgcatggtgtacctgcgcaacctgctggcggcctacgaagtgcacgtcggccactactacctgaagcgccaggcctatgtcgccgccgccaaccgcggtcgctacgtggtagagaacttccaggaaaccccggccgtcggcgatggcctggcgatcatggtcgaagcctaccgtcgcctgggtctcgacgacctggccagcaccagcctggaaaccctcaagctcaactatccggataacgccagcctcaaggatggcgagttcgtcgcccgcgaaagcgaggccgacacccgctcctggctggccaaggccaccctgggcctgatcgaaggcggcgagccgccgccgcacatggaaacccaggccgccaaggacgtgatcaagcagtacgaggatgccgagcgggagatccccgccgaactgaagccggaaaaccaggatcacagcgccgacgacgagaagccggagagcgatgacgacgaagactccggccgctcctggtggagctacatgaccttcggtctcttcgactgatcgcacgaaacaccgaagggaggcgcaggcctcccttctttttgcccgccgccatgcctctcccagcgccaaacgccgcacagcctggaccttcccggctgggatcgagccggcggcttggctaaactgcagctttctccagcctccgagatcaccatgggccttttccgcctcctgttctggatcgccctgatcgccatcgcgttctggctctggcgtcgctttacccgtcccactccgcgccagcagcaacgtccgcaggacgagccgagcgcatcgccgatggtccgctgcgcccattgcggcgtccacgtgccgcaggccaacgccctcgcccacgaacaacgctggtattgcagccaggcgcacctgcgccaggaccagggcgaccgtgcgcgctgaacggctacggctgagcgaggagcaggggcaacgcatcctccgtctgtaccacctgtaccgcctgaccatcggcctggtactggtcctgctgatctccagcgaactggaagatcaggtcctcaagctcgtccaccctgaactgttccatgtcggcagttggtgctacctggtcttcaacatcctggtcgcgctgttcctgccgccgtcgcggcaattgctgccgatcttcatcctcgcgctcaccgacgtgctgatgctttgcggcctgttctacgcaggtggcggcgtacccagcggcatcggcagcctgctggtggtggcggtggccattgccaacatcctgctgcgcgggcgcatcggcctggtcatcgcggcggcggccagcctcggcctgctctacctgaccttcttcctcagcctgagcagtccggacgccaccaaccactacgtccaggccggcggcctcggcaccctgtgcttcgccgccgcgctggtgatccaggctctggtgcggcgccaggagcagaccgaaacgctggccgaagaacgcgccgagacggtcgccaacctggaggaactcaacgcattgatcctgcagcgcatgcgcaccggcatcctcgtggtcgatagccgtcaggccatcctcctcgccaaccaggccgccctcggcctgctcaggcaggacgacgtgcagggcgccagcctgggccgccacagcccgatgctgatgcactgcatgaagcaatggcgcctgaatcccagcctccgtccgccgacgctcaaggtggtgccggatggcccgacggtgcaacccagctttatcagcctcaaccgcgaagacgaccagcacgtgctgatcttcctcgaagacatttcgcagatcgcccagcaggcgcagcagatgaagctggccggtctcggccgcctgaccgccggcatcgcccatgagatccgcaacccgctgggcgcgatcagccacgccgcccaactgctgcaggagtcagaggaactggatgccccggaccgacgcctgacgcagatcatccaggaccagtcgaagcggatgaacctggtcatcgagaacgtcctgcagctctcccgtcgccgccaggccgaaccgcagcagctcgacctgaaggagtggcttcagcggttcgtcgacgaataccccggcaggctgcgcaacgacagccaactgcacctgcagctcggtgccggcgacatccagacccgcatggacccacatcagttgaaccaggtgctgagcaacctggtgcagaacggtcttcgctacagcgcccaggcgcacgggcgcggccaggtctggctgagcctcgcgcgcgacccggagagcgacctgccggtgctggaaatcatcgacgacggtcccggcgtaccggcggacaaactgaacaacctgttcgaacccttctttactacagaaagcaaaggcaccggcctgggcctctatctctcccgcgagctctgcgagagcaaccaggcacggatcgactaccgcaatcgcgaggaaggcggcggctgcttccgcatcaccttcgcccacccgcgcaaactcagctgacggaagccgcacgcatgagccgacaaaaagccctgatcgtcgacgatgaaccggatatccgcgaactgctggaaatcactctcggccgcatgaagctggacacccgcagcgcccgcaacgtcaaggaagcccgcgagttgctggcccgcgagccgttcgacctgtgcctcaccgacatgcgcctgccggacggcagcggcctcgatctggtccagtacatccagcagcgccatccacaaaccccggtggccatgatcaccgcgtacggcagcctggacaccgcgatccaggcgctcaaggccggtgccttcgacttcctcaccaaaccggtcgacctcggtcgcttgcgggagctggtggcaaccgccctgcgcttgcgcaacccggaagccgaggaagcgccggtggacaaccgcctgctcggcgagtcgccgccgatgcgcgccctgcgcaaccagatcggcaagctggcgcgcagccaggcgccggtctacatcagtggcgagtccggtagcggcaaggagctggtggcgcgcctgatccacgagcaggggccacgtatcgagcggccgttcgtgccggtgaactgcggcgcgattccctccgaactgatggaaagcgagttcttcggccacaagaaaggcagcttcactggcgctatcgaagacaagcagggcctgttccaggccgccagcggcggcaccctgttcctcgacgaagtcgccgacctgccgatggccatgcaggtcaaactgctccgggcgatccaggaaaaggccgtgcgcgcggtcggcggccagcaggaggtcgccgtcgacgtgcgcatcctctgcgccacccacaaggacctcgccgccgaagtcggcgccgggcgcttccgccaggacctctactaccgcctcaacgtcatcgagctgcgcgtaccgccgctgcgcgaacgccgcgaggacatcccgctgctcgccgaacgcatcctcaagcgcctggccggcgacaccggcctgccggccgccaggctgaccggcgacgcacaggagaagctgaagaactaccgcttcccgggcaacgtccgcgagctggaaaacatgctggagcgcgcctacaccctgtgcgaagacgaccagatccagcctcacgacctgcgcctggccgatgcgccgggtgccagccaggaaggcgccgcgagcctgagcgaaatagacaacctcgaggactacctggaagacatcgagcgcaagctgatcatgcaggcgctcgaggagacccgctggaaccgcaccgccgcggcccagcgcctgggcctgacgttccgctcgatgcgctaccgcctgaaaaagctgggcatcgactgaaagtgaaaaggcctgtccgaagacaggccttttggttttcgctcctcagaggcgaccagccggggcgtaggggaccgggtcgatgatcggttcccgcccgctcatgagatccgccagcagacggcacgacgccggtgccaggaccagcccgttgcggtagtgcccggtattcagccagagcccgtcgaagccaggcaccggaccgatataggggatgccttcgggagagcccgggcgcaaccctgcccagtgggccaccggctgcatgtccgccagttccggcaacagttctgccgcagacgccctgaggctttccagcgcctcgtcggtcggcgtcttgtcgaagcccgaatgttccaaggtgctgccgatcaggatgtggccgtcgcgccgcggaatcgcgtagcgccccttggccagcaccatgcgcggcaggaaatccgccgcgcacttgtagaggatcatctgccctttcaccggtaccacgggcagttccaggccaagcggcttcaacaactcgccgctccaggcgcccgccgccagcagcaccttgtcgccacggatctcgccacgcgaggtcgccacgccgaccactcgatcgccgtcgcgcaaccagccgcgcacctccgtctgctcatgcagttcgagattggcgaattgttgcagggatgcccgcaatgagcgcgccaggcgaggattgcgcacattggccacgcccgacatgtagaccgcccgctggaagccggcgcccagcccgggcaccgccgcgtaggcctcctcgatcggcacttccttcaacggccgggtgtgcttgcgtgcccactgcagtgcctcggtctggtcgtccaagtccagccagtacaggccaacggtatggacctcgggatcgagcccggtctcgtcgagcaaacgctgccccagggccgggtagaaatcctgcgaccagtgcgccagggcggtcaccgccgggctgtagcgccacggatagagcggcgagacgatcccgcctcccgcccaggatgcctcacgcccactctcgccccgctccaccagggtcacccgcagtccggcgagcgccagctcccgggcggtcaacaggccgatgacgccagcgcctaccactactacatctctactcaccacagggctcctaccgatttgccaggaacagagaaatatcactcaaagggatcagatgctgacgaattgcctgcttcaacgaactcagtcgaatctgtcccggtgaaaagcccatcatacccgcagaggtattcatcccatgaaatcgagcggcttcaacttggtcgaactatcgatagtcctattgatccttgcgataggcctgacaattgcgctgcccaccctccacgacagagtgaagcgggacattagccgtgctactcgtgacagcctgactagtcatctgatggctgcgcgggctagcagcatacagaacggcgtgatcatcgaggtctgcggtagcggtgacggcagtacctgcagcgaggaatggcatctcggctggttcagccgtaacgacaggagccaacagatactggcccggcatgaaaatacgagtcgcaccgatattcattggcggggcttcgacaagcgactgcgctacctgcctaatggcaccagccctacaggtaacgggcgtttcttcgaatgtaaggacgatcgcatcgagtggcaattggtgctcaatcggcaaggccgcctcagggtggcgggaaagagcgaaaataaaaagctctcttacctgtgctccaggcggtgagagaactgtttcacataccgtttgccagtcatcccactctccgctccggctgtctctgctacagggacaatgcgctctccactaggcaagattatctggcccttttccttgtggagtactgcatgcgctctatttgtcgcagcgccggcttttccctgatcgagttgatgatggtgttggttctggtcgccatattcgccagcattgccgtacccagtttcaacgccttgatcgagcgcaaccgaatccagactgccagcgaggaactctacagcctgcttcagtacgctcgcagcgaagctgtaaaccgtcatgccaatgtgagcatcagggcgacgcagaacaatgactgggcaaaaggcctggaaatcatcagcggcgcgaccaccgtgcaaaagcaccaaggtttccagcaggtctcgctatccgccagcagtgcgactgcggagctgaccttcaacgctaccggcacacttagcaaccaggctgcaaacattgacataaaggtctgcttcgccggtgacaaaagtacaggacgtctgcttaccgttcagcccagtggacgcgtgatcctgtacccatcttcaaagcaaccggacagctgtaactgaggaaagcccatgtctcgagaaacgggtttcagcatgatcgaagtactggttgctctggtgctgatcagcattggcgtactgggcatggttgccatgcaagggcgcacgatccagtacacgcaggagtcggtacaacgcaatgccgcagcaatgcttgctagcgacctgatggaaataatgcgtgcggacccagatgccgtactcaatctacgcgcccaactacgcgaagactcggtctactacaaggccaagggcagcgactttcccgcagccccagcgcgctgcgcgccattgccagcagatgctaaggaacgtctcggctgctgggcccaacaggcctcgaaagacttgccgggagcctccgcactcttgaatagccaattctacatttgtcgcagcccaaccccgggtacctgcgacaacaccaaaggctcggccatcgaaatccaggttgcctggcgagccatggatggagcgtgtttcaacgcctctgactccaccttgtgcacctacagcgtccgctccgaattgtgagaacaagcatgctcttcagcaaaatgcagaaaggcctatcgatggtagaactgctcgtggcactcgctataagcagcttcctgatcctggggatcagccagatctacatcgacaacaaacgcaactatcttttccagcaaggccaggccggcaaccaggaaaatagccgcttcgttcttatgctgctgcagcaacaactggataagacagcctatcgtcgccttcacgacgacaacatggagaatgctttcaaatccgcgacattcaatggctgtcgtgcatttgtggctggcgagactatcgctgcggcaactgccctcaaggcgggtgagtacggtgtctgcttgcgctatcaacccgcctacaaaggggagcatgattgcctcggtaatgaaattaccggagttccggaaaagcccttcacaaatactccccctgtcgtcgttcgcctggtctacctaccgagcgccggtaccctgagttgcaatcgtcccgatatcgcccagtcgaaatcgggagaattggtcagtggtctcacagacttccgcttggaagcgggggtcgggccagcagatcgtagcgaacgcaaagtatccagcttcgtcgcactacaggatgtcgccggtcgtcctatccgagcattgcgcttctcaatcctggcaggcagcgacaatacaagcctgcgcacaggagatgatagccaggcacgcgatcgctggatcgtcctttatcccgagagcaaaagcgccatcgaggccgcagacaaaggccagatttaccaaatagcgcgtggtaaccaaaccatcaggaatctcatgccatgaccctgcgccatacctctcgacagcagggatccacgttgttgatctcgctggttatcttgttgatgatcacgctcctcgccgtttccaacatgcgcgaggtgtcactggaaagccgtatcaccggcaatctcatcgaacagaagcgcctgcgcaatgcgggcgaagctgggctacgcgaaggtgaacgacgctttttcaataccatcaagcccccagaggtcggcagcggatgcgccgatagcaatgtcaaacggccttgcatactgaacctgagtgccctctccgtaccccgagatgacgtgcacaacaatccggtggcagccctgaacggcaagacagataacgccaattcacgtgtctggatgccctaccgaggcagcgatctgaataaccctacgcagatcgacaaagaccgcgcagtcacctggcagaccatcacggtgcccgctggcgaacagaacaacgaagcggaaaatcccgagtacggcaacatgatgcgcggggtcggcacgttctactacgaaaccaacagccgcgccctcaacaaggcgggcggagagactgttctacaggccgttcatgcacgcctgtataccaactgactggagccagcgcatgatccaccagattacccgcgcaggaaaaagcctgctggctgcaggttgcaccctgagcatcctgttcgcctctgacagttatgccgccacggccctgaatgtcagccagcaacccctgttcctaacccagggcgttgctcccaacctgctgttcactctagatgactcaggcagtatggcctgggcttacgtgcccgacggtattagcgggaatagcggcagagcgggacgttccagcgattacaacgcactgtactacaaccccgattatgcttaccaagtgcccaagaaattgacactgtcaggcgatcagatcatcgtttccgactatccagtgccacgcttcacagcagcctggcaggatggctacgcccaaggctccaccaccaacctgagcaataactatcgccctcaatggggaaccggctggcttggttgcatcgataacagctgcaataccgggagagcttattactatacttataaggtaagcgctagctgccctgcacagccggtgagcagctccaactcctgttatacctacaatgctcttcctaccagtcaggaaagcaactttgcgatatggtactcctactatcgcaaccgcatcctggccacaaagaccgctgccaacctggccttttacagcctgccggaaaacgtgcgtctcacttggggggccctgaacacctgtagcatcggcgccaacagcagaagctgccaaaacaatgccctgctccaattcaacaagcagcacaaaatcaatttcttcaattggctggcgaacagcccggccagcggcggtactcctctgcatgcggctcttgaccgagccggacgcttcttgcaaaccaacggcacagcttataccaccgaagacggaaagacatattcctgccgggccagctatcacatcatgatgaccgacggtatctggaacggtcggaacgtcacccccggcaatctcgacaaccagaaccagacctttcctgatagcaccctctataggccacagcccccttatgccgacagcaatgccagctcattggctgacctggctttcaaatactggaccacagacttacgtcccagcatcgacaatgacctgaagcctttcatggcctacaagagtggggacgattccaaggattactgggaccctcgcaacaacccagccacttggcaacacatggtcaactttactgttggcctgggtctttcctattcgctcacattgaactctgcaccaacttggacaggcagcacctttggcaactacgaggagttgatggctggaagcaaggcttggcccagcgtcggtaacgacgccgcacccggtaacgtctacgacctctggcatgcagctatcaactctcgtggagacttctttagcgcggaatcaccggactctctggttcaggctttcaataagatcctgacacggatttccgagcgcaacacctcctcctccaaaccagcaatgacttccgcgctgcaggatgacggaaccggcgacaagctgatccgctacagctaccagtccagctttgccagtgacaagaactgggcgggcgaccttatacgttacaaggtggagtcgacttccaccggttcgaccaaaacccaggaatggagcgccggcgcactgctggacaaccgagctcccgctacccgtaatatttacatcgccagcaatagcggaaccaaccgccttaagcctttcacatggagcaatattgagggaagtcagttagccacttggctgaaccgcaacccggacaaggacaatcaggccgacaccaaaggagcacagcgggtcgacttcatccgtggccagcagaatatggatggattccggcaacgacaggcggtgttaggggacatcgtgcactcgtctccagccgtggtcggaccggcccaatacctcacttatctggccaaccccatcgaacccagcggcgactacggcacattcaagacagaggcagaccagcgcagccctagagtttatgttggatccaacgatggcatgttgcatggtttcaacatcaaaaccggcgtggaagagttcgctttcatccctacagcagtattcgaaaagcttaacaagcttaccggcatcagctaccagggcggtgcccaccaatatttcgtcgacgctacaccggtcgtcagcgatgcctttttcgatggagcttggcacactgttctgatcggaacgcttggtgctggaggtcgcggcctgttcgcactcgatgtaaccaagccggacgatgtcaagctgctttgggaatacgatagcagtaccgactcggaccttggttacaccttctccaaacctaccgtagccagactgcacagcggacaatgggcagtagttaccggcaacggctatggaagcgataatgacaaggcagctttactgctgattgatttgaaaaagggaacgctgatcaagaagctggaagtccaaagcgagcgcggaatagccaatggcctatcgacgcctcgcctggctgataacaacagcgatggcattgctgactacgcctatgctggcgatctgcagggaaatatctggcgcttcgatttgatcggcaatacccgcaacgacgacccagacacaaatacctctatcaatcccttcaagcccggagatgtagatccttctgctttcagagtatcgttcagcggcgccccgcttttccgtgctcgcgccgacaacaatactcgtcagcccatcacggctccgcctaccttggtacgccatcctagccgtaagggctacatcgtcatcgtaggtacaggaaaatacttcgaggacgatgacgctcaggccgataccagccgagccatgacgctctatggtatctgggatcgccagaccaagggcgaaagcgcaaacagtaccccaaccatcgaccgcaacgccctcacagcccaaaccatgacaacagaggcgaactccacattcggtagcgtgaacaggaatattcggcttattagccaaaacccggtgaagtggtacaaagacggagcaaccggtaccgcgaactcggatgtggctagctatggctggcgactgaatctggaggtcaatagcagcaagaaaggcgaaatgatgatcgaagatatgttcgctgccggccaagtgcttctattgcagaccttgacaccgaacgacgacccttgtgacagcggctctaccagctggacctacggcctcaatccatatactggcggacgtaccagtttcaccgtcttcgatctcaaacgtgcgggtatagtggactctggctcggattacaacggctcggtcgtatccgccttccaacaggatggactaggtggcttggccattacccagaacgaacagcgtcaatccgaggcttgcactggtgatgagtgcatcatcttcaaccccagcgacaagagtaacggacgacaaacctggcgggtcgtcgaggagaaatgaacatgaaccccttacgtcttctcgccacagctcttgcagctctagctctggcttgcccaacctttgccttgagtgccacgaatacgttcgagaatgtgggcgtggtcgaggatgttcatcctgccaccggtctggtagtagtcgatgggcagacatatcgcttgcccaaccgtgtccaacaacaggactcgccggtcatattcttggtacgtcagggacagacagtgtctttctccggcaaactcaccagcgacctgccagaaatcgagtcgttctacattatcaagcaggcccctctcgttcccttcggatcggagcagcaacaatgaagtcgaacagaggcttcactctcatcgagttgatgatcgtcgtagtaatcatcgctattcttgctggtatcgcctaccccagctacgacgaatacgtgaagcgcgggaatcgcaccgaaggacaggcattactcagcgaagcagccgctactcaagagcgctatttttcacagaacaatacttatatcacgacccaagccgacatcggcaagctgcatatgcgcaacacatcgggcaccacagtgaagtcctccacaggcaaatacagccttaccgtcgatacggtagccaacgacggaggttatcgccttatcgccaaccaggcattcaacgatcttgattgtggcaacctgaccttgaccgccaacggcgagaaaggccggactggaagcaagaagagcgttgcagaatgctggcgctaaagcgccgagacaagaaaaaggcaaagcccggcataagccgggctttttcaggtgcgcaaaaatttcgattacaaagccttgacccgcagttccttgggcatcgagaaggtaatgttctcctctcgcccgtccagttcctgttcctccgacgccccccactcgcgtagctgggcgatcacgccgcgcaccagcacttccggcgcggaggcgcctgcggtgattccgatgcgacgcacaccgtcgaaccagccgcgttgcatgtcctcggcgccgtcgatcaggtaggccggcgtgcccatccgctcggcgagttcgcgcaggcggttggagttggaactgttggggctgcccaccaccaggaccatgtcgcactggtcggccagttccttcacggcatcctggcggttctgggtggcatagcagatgtcgttcttgcgcggtccctggatctgcgggaacttggcgcgcagggcatcgatgaccttcgaggtgtcgtccatcgacagggtcgtctgggtcacgtagtgcagggcttcgggcttgcgcacctccagcgcggcgacgtcggcctcgtcctccaccaggtagatggcaccaccgttgctggcatcgtactggcccatggtgccttccacctcggggtgcccttcatgcccgatcagcacgcattcgtggccgtcgcggctgtagcgcaccacttccatgtgcaccttggtcaccagcgggcaggtcgcgtcgaaaaccttcaggccgcgcccctcggcttccttgcggaccgcctgggaaacgccgtgggcgctgaagatgacgatgacgttgtccggcacctgatcgagttcctcgacgaagatggcgccgcgctggcgcaggttgtccacgacgaacttgttgtgcaccacctcgtgacgcacgtagatcggcgggccgaagacatcgagggcacggttgacgatctcgatggcgcgatccacgccggcgcagaagccgcggggattggcgagtttgatttgcatggcggtctcgtgggcgacgcggtgattggacgaatgaaccttgctaccgccctccccgcttgggaagggcgcagcgaccgacggttcaggccggctggacgtcgatgatctcgacttcgaaggccagggtcttgccggccagcggatgattgaagtcgacggtcacctgctgctcatcgaacgccttgaccacgcccggcagttcggtcttggccgcgtcgttgaagatcaccagcaggccctcggccagttccatgtcctggaactggtcgcgcggcatgatctgcacgttctgcggattcggctggccgaagccctgttcgggaagaatgctcagggtgcgcttgtcgccagccttcaagccgaacagcgcctgttcgaagcccggcagcaggttgccgtcgccgaccttgaacgaggccggctgcttgtcgaaggtgctgtcgacgacgttgccgtcctccagcttgagggcgaaatgcagggtgacgcggctctcctcgccaatgcgggtcgactcagccatgggcggcttctccggatttcttcgatctgaacatgtcgagcgccagcatgacggcgccgacggtgatggcgctatcggccaggttgaacgccgggaagtaccagcggttctgccagtgcaccaggatgaagtccaccacgtggccaaggaccatgcggtcgtagaggttgcccagggcgccgccgagcaccagcgccagggcgatggccaaccaggtctcgcctttcttcaggcgtttcagccagaccaccaggatcgcgctgacgacgatggcgatcagggcgaatagccagcgctgccagcccgagctgtcggccaggaagctgaaggcggcaccggtgttgtaggccagggtccagctgaacagatcggggatcaccacgatctgctggtacatgctcagttcggcctggaagaacgccttgctgagctggtcgaggacgaacaccagcacggtgatccacaaccagggcaagcgcccgaaacgatcgacctcaggcatagtggcgaacctcgccgctgccttcgatgttctcgatgcagcgaccgcacaggtcaggatgcgcagagtgctgaccgacgtcctcgcgatggtgccagcaacgaccgcacttggcgtgggtcgacttgaccactttcagcttgaggccggcgacttcgctgtccaccgcgtcggccggagccgccgacagcggcgccagggtcgcggtcgaggtgatcaggacgaagcgtagctcgttgcccagcttggccaattgggcctgcagcgcgtcttccgcatacagggtgacctcggcctgcaggttgccgcccacggccttggccgcgcgctggttctccagctccttgttgaccgcggccttcactgccatgacctgttcccagtactggcgattcagcgtcacgtcgaccggcagttcgctgaggccgtcgtaccaggtggcgagcattaccgactcggcgcgctcgccgggcaggaacttccagacttcctcggcggtgaacgccaggatcggggcgatccagcgtacgagggcctcggcgatgtggaacagtgcggtctggcaggagcgccgggcgacgctgttggcgccggtggtgtactggcggtccttgatgatgtccaggtagaacccgcccagctcctgtacgcagaagttgtgcaccttggaatagacgttccagaagcggtactcgcggtacgcctcttcgatctcgcgctgcaagagcagggcacgatcgaccgcccagcgatccagggccagcatttcctggggcggcagcagatccgtggccggatcgaaaccgttcaggttggacagcaggaagcgcgtggtattgcggatccgccggtaggcatcggcgctgcgctggagaatctgctgggataccgcgatctcgcccgagtaatcggtcgaggctacccacaggcgcaggatgtcggcgcccagggtatcgatgacggtctgcggcaccacggtattgcccagtgacttggacatcttgcggccggactcgtcgacggtgaaaccgtgggtcagcaactggcggtacggcgcatggttgtcgatcgcgcagccggtcagcagcgaggagtggaaccagccgcggtgctggtcggaaccttccaggtagagatcggcgaccgggccgctggcatggccgatccggtgggagccacgcagcacgtgccagtgggtggtgccggagtcgaaccagacgtccagggtgtcgttgatcttgtcgtactgcgcggcctcctcgccgagcaactcggcggcgtcgagcttgaaccaggcttcgatgccttccttctcgactcgctgcgcgacctcttccatcagctcgacggtgcgtggatgcagttcgccgctggccttgtgcaggaagaacgggatcggtacgccccagttgcgctggcgcgagatgcaccagtcgggacgcccggcgatcattccgtgcaggcgcgcctggccccagcccgggacgaattcggtctgggtgatggcttccagcgctcgctcgcgcagggaagcaccctgcctgggctgcttgtccatgccgacgaaccactgcgcggtggcgcgatagatcagcggcgtcttgtgccgccagcagtgcatgtagctgtgattgatggtttcgtgggccagcaggctgccgacctcttccagcttggccaccacgttggggttggccttccagatgaactggccgccgaagaacggcaacgagtcgacgtagacgccgttgctctgcaccgggctgaggatgtcgtcgttgctcatcccgtagcgcttgcaggtatagaagtcgtcttcgccgtaggccggcgacgagtggacgataccggtgccggcatcgagggccacgtagtcggccaggtacaccggcgacaggcgctcgtagaacggatggcggaagttgatcagttccagcgcctcgcccttggcggtggcgaccaccttgccctcgcgctggtagcgcgccaggcaggactcgaccagggcctcggccagcaccaggtagcgatcgccggcatcgaccagcgcgtagtcgatctccggatgcacgttcagcgcctggttggccgggatggtccagggcgtggtggtccagatgacgatctgcgccggcttgtccagggccgccaggccgaaggccgcggccagcttgtcggcatccgccaccgggaagccgacgtcgatggtcggcgacttcttgtcggcgtactcgacctcggcctcggccagcgccgaaccacagtcgaagcaccagttgaccggcttcaggcccttgaacacgaagtcctgcttgaccatttccgcgagggcgcggatttcgttcgcctcgttggcgaaattcatggtcttgtaggggttgtcccactcgccgagcacgcccaggcggatgaagtcggccttctgcccttcgatctgctcggccgcgtattcgcggcacagttcgcgggtcttgtccgccggaagattcttgccgtgggtggtctcgaccttgtgctcgatgggcaggccgtggcaatcccagcccggcacatagggcgcgtcgtagcccgccagggtcttggagcggacaatgatgtccttgagaatcttgttgaccgcgtgaccgatgtgaatgctgccgttggcgtacggagggccatcgtgcaggacgaacttcggacggtcgccgccaatggcccgcagcttctggtacagaccgatgtcgttccagaacttcagggtttccggctcgcgctggggcaggccggctttcattgggaaggcggtttccggaaggtttagcgtcgctttgtagtcggtcatctcagggcctgttcaggatctcttcaatcaagcggttggcccagccagtaggcccgggcggcggcgatatccgcgagaatcgccgccttgagtgcctccagggaggcaaaacgctgctcgtcgcgcagcttctggtggaaggtcacctgcagatgccggccgtatagatcgccggcgaaatcgagcaggtgcacttccagatggggacggccgtcgccgttcaccgaagggcgggtgccgatgttcgccaccccctggcaacgctggccatcgaccagcgtactgaccaggtagaccccgttcaacggcgccttgcgccgtttcagttgaatgttggccgtgggcgagcccagttgccggccgagtttctgtccatgcaggacccgtccgctcaggctgaagggacgccccagaaggcgctcggcgagatgcaggtcgccctcggccagggcctggcggacccgcgtgctgctcacccgcacgccgtccagttcgacggtggcggccgcctcgacggtgaacccctgctcgcgactggcgttcaccaggaaggcgaagtcaccggagcggtcgcagccgaaacggaaatcgtcgcccacttcaaggtgccgcaccgccagtccatcgaccaggacctggcggacgaactcggctgccgacagctcgcgcaagcggcggttgaaggccaggcagagcaccacgtcgacgccctgcccacgcagcaactcgagtttctcgcgcaggcgggtcagacgcaccggcgccgaatcgggggagaagaactcgcgcggctgcggctcgaaaatcaccacgcagctgggtacgcccagctccagcgagcgctcgcgcagacgcgccaggatagcctggtgcccgaggtggacgccgtcgaagttaccgatggtggcgacgcagcccccggccaggggctgcaggttgtgtagtccgcgaagcagctgcatagcacgcttattgctcagaaagtggtcgattatacgcgtaccgggcgccggacaacaggcaaaacggcatgatcccgccgccagcccggacgcgcttcacagcaccgcccggcgggaaaagtcgcgcaggcggaaacccagcagcgcgagcataccgaaataggccaggagaccggcaaccaccagcaggccgaggcgcaggaatcgctccagcatggcgccctgctcccaggccggcagccagtgcatcgtggccagcagcaccgccgacatcgccagcaccgcgaccaccagcttgaccaggaacttcgcccagcccggttgcggcaggtacagacgctgcttgcgcagttgccagtagagcagcccggcattcaggcaggcggccaggccgatggacagggccaggccggcatgctgaagcgggccgatgaaggccaggttcatcagttgggtggaaaccagggtgaagagcgcgatcttcacaggcgtacggatgttctgctgggcatagaagcccggcgccagaaccttgaccaggatgatgccgagcaggccgacggagtaggccaccagcgcgcgctgggtcatcgccgcgtccaccgtggtgaacttgccgtactggaacagcgagacggtcagaggttcggcgaggatcgccagggccagcgaacagggcagcaccagcaggaagcacaggcgcaggccccagtcgagcaggcgcgagtactcatggcgatccttgttcgaataggtcttcgccagcatcggcaggaggatcgtccccagcgccacgcccaatacgccggaaggcagctccatcaggcggtcggcgtagtacatccaggacaccgaaccggctgccaggaacgaggcgaagatggtgttgatgatcagcgagatctggctcaccgagacccccaggatcgccggcagcatcagcttcatcacccgccagacgccgctgtccctgaggttcaggcgcggcagcacgagcatgccgatcttcctcaggtgcggcagttgatagaggagctgcaacaggccgccggccagcaccgcccagcccagcaccatgaccggcggatcgaaataaggcgtgaggaacagcgcgaagccgatcattgcgacgttcagcagggtcggcacgaaggccggcaccgagaagcggttccaggtgttgaggatcgcgccggcgagggacgacagcgagatcagcaatatataaggaaaggtcacccgcagcaggtcggtggtcagggcgaacttttccggggtatcggcgaagcccggcgcggtgacccagataacccagggtgcggcgaggatgccgagcgccgtgaccagcgccagcaccagcgtgagcaagccggaaacgtaggcgatgaaggtccgcgtcgcctcctcgccctgctggttcttgtactctgccaggatcggcacgaaagcctgggaaaacgccccctcggcgaagatccgccgcaacaggttaggcagcttgaaggcgacgaaaaaggcgtcggtggcgaggccggcaccgaagatccgcgccaggatggtatcgcggacgaagccgaggacccgcgacagcatggtgatggaactcaccgccgccaatgatttgagaagattcatggatgtcgggctgccggcatgtcgaaattgatcctgtccaagaccgcgaccggccgggccggttcatcgcgcgagtgcgccctcgccgccgaacggcggtccgcaagggcgcgccgagtgtagaatgcgcgccggaataaatcacccgcaagaaagcaggcgacatccgtcgccgatctttccggccgcatgcgcagccccttgacaacccctggaggcgacggcattattcgcggccttaatttgttcgctatttacccagtttttttcgaggagctcgacggtggccaacacaccttccgccaaaaaacgcgccaaacaggctgagaagcgtcgcagccacaacgccagcctgcgctccatggtgcgcacctacatcaagaacgtcgtgaaagccatcgacgccaaggacctggaaaaagcccaggccgccttcaccgccgctgtaccggtgatcgaccgcatggctgacaaaggcatcatccacaagaacaaggctgctcgtcacaagagccgtctgagcggccacatcaaggccctcagcaccgctgccgcctaaggcacgccttgctcgaataaaaaaccggccaatggccggttttttattgcccgcgactcgctcgcctcagcgagcggtcggccagggcatgaggggaatcgccgtcaccgcgttctgcggactaccttcgatcacccggtcgctgtagaccagatagaccaaggcattgcgcttgcgatcgaagaagcgcaccacctgcatgcttttgaacaccagcgaagtgcgctgcttgaacacctcttcgccatccttgagttcgccactgaactggatcggccccacctggcgacaggcgatcgacgcctcggcgcgatcctccgccagcccaaggccgccctttaccccaccggtcttggcgcgcgacagatagcaggtcacaccctgcaccttgggatcgtcgaaagcctcgacgacaatcttgtcgttcggcccgacccacttgaacaccgtggaaacctcgccgatctcctccgccccggcaagcgccggcaacagcagcagaccacccagcaaccccgcgagcttgcgcattcgccctctcctcagaccagaaccagattgtcgcgatgcaccagctccggcccatccacgtagccgagcaaggcctcgatggcatccgtcggctgaccgaggatcttctgcgcctccagcgcactgtagttgaccaggccgcgcgccacttcgcgcccgccctggtccacacagaccaccatctcgccgcgacggaagctgccctggaccgccttgaccccaaccggcaacaggctcttgtgatcctggctcaccgccttcaccgccccatcgtccagcaccagggtgccgcgcatctgcaagtggccggccagccattgcttgcgcgccgccttgcgactgcgatcaggagtcaacagggtgccgaggcgttcgccggcgcgcaggcggtcgaggacacgctcgatacgcccgccgacgatcaccgtatgcccgccggaacgcgccgccaggcgcgccgcccgcagcttggtctgcattccgccgcgccccagggcgccggcactgccgccggccaccgcatcgagctgcggatcgtcggcacgcgcctcgtagatcagttgggcatcgggattgttgcgcggatcggcgtcgaacataccgtcgcgatcggtaaggatcaccagcaggtcggcctcgaccaggttggccaccagtgccgccagggtgtcgttgtcgccgaagcggatctcgtcggtgaccaccgtgtcgttctcgttgatcaccgggaccacgcccagctcgaccagggtccgcagggtgctgcgggcgttcaggtagcgcttgcggtcggagaggtcgtcatgggtcagcaacacctgggcggtctgcaggccatgcagggcgaagctggactcccaggcctgcaccaaccccatctgtcccaccgaggcggcggcctggagttcgtgcatcgcgctaggtcgggacacccagcccaggcggctcataccggcggcgacggcgccggacgacaccagcaccagctcgatgccggcgcaatgcagcgccaccatctgctcgacccaaacggccatggcattgcgatccagcccacggccatcggccgtcagcagggcgctaccgatcttcaccacccagcgccgcgcgccagtcaccttgtcccgcataccctcaaccttagaagcccaggcttcgactcttcagccccgccggcccgcccggcggggtatcacgccatcagggaacgtagaagatctccggaccgtcgccgtcgtcttcctcatcatcgaaatcatcgtcatccaccgcaccagcgttcttcagccccgaacgccgcagcgcgcgcgcatcgtccagggcctgcagacgggcccgcgcctcgtcctcgatacgccggtcgagttcggccagctcctcggcatactgcggatcttcttccaggcgcagggtacgctcgtcgagatagcgcatgatgtcctggctgagcgcctcggtgccatcgcgctccagggcggagatcacatagaccgggccttcccagcccaaccgctcgatcaccgcctgcttgcgcgcctcgcgctcggccggatcgaggatctggtccatcttgttcagcaccagccagcgctcgcgctcggtcagcgccggactgaagcgacccagctcgcgaacgatgacctcggcggcatcggccggatcgctttcgtccagcggcgccatgtccaccagatgcaggaggatacgggtccgcgccagatgcttgaggaagcggatgcccagcccggcgccttcggcggcaccttcgatcaggccgggaatgtcggcgaccacgaagctcttgtagcgtccgacgctgaccacgccgaggttcggcaccagggtggtgaacggatagtcggccaccttcggcttggccgcggacactgcacggatgaaagtgctcttgccggcattcggcagtcccagcaggccgacgtcggccagcaccttcagttccagcttgaggtcgcgcgcctcgcccggcttgcccggggtggtctggcgcggcgcccgattggtactggatttgaaacgggtgttaccgaggccgtgccagccgccctgcgcgaccatcagccgctgaccgggctcggtcaggtcgccgatgatttcctgggtattggcgtcgatcacggtggtaccgaccggcaccggcaggatcaggtcgtcgcccttggccccggtgcagtccttgctgccgccgttctcgccgcgctgggcatcgaaacggcgggtgtagcgatagtcgaccagggtgttcaggttgacgtcggcttccaggtagatggaaccgccgtcgccaccgtcgccgccgttgggaccgcccttttcgatgaacttctcgcgacgaaagctcatgaggccattgccgccgtcaccggctttcacgtggattgatacttcatcgacgaatttcatggatacgcctcccaccacgagggcgggttaacagaaaaaaacataggatacaggatgccccgaaagcagggcatggccggaagccggcgcagaaacaaaaaagccccgtcgcgagacagggctttttcagcgagctattgcttaggcagcaacgatgctcacgtatttgcgaccaaaggcgcctttggtctcaaacttgaccacgccgtccactttcgcgaacagggtgtggtccttgcccaggccaacgccgtaaccggcgtggaatttggtgccgcgctgacgaaccaggatgttgccagcctttacagcctggccgccgaacagtttcacgccaaggcgtttactttctgagtcgcggccgttgcgggtagaaccgccagcttttttgtgtgccatgagtcatatcctccagaaaggaattaggcctgaatgccggtgatcttgatttcagtgaaccactggcggtggccctgacgcttcatgtggtgcttacgacggcggaacttgatgatgcggaccttgtcgtgacggccgtgggaaaccacttcagcggtaaccttcgcaccttcgacgaccggcaggccgattttcacgtcttcgccattggcaaccagcaggacgcggtcgaaatcgatcgcttcgccggtagcgacgtcgagtttctcgaccttgaggaattcgccttcggtgactttgtgctgcttgccaccggtaacaatcactgcgtacatgtgtatctccgttaaacctgctcacccgacgctttatagaagtaggaatcggccggcatggctgcatggggtcggatcggacgcccgtgcaattgcgtaaggcagggtatgccaaggaagttcagggcccgcgattgtacggaaaggtccaggccgaggcaagtgccacgggcctttccttgacagtcccccccctgccacctagcatgccgcgcaatctttgtggagctattgtcactgatgcaaccccaggccttctaccgcgtggtggcggaagatttcaccgccgtcgacgggatcatccgtcgccaactcacctcccgcgttcccctggtggaaaagatcggcgactacatcatctccgccggcggcaagcgcctgcgcccgctgctggtcctgctcgccggcaagaccctgggctacaagggcgacgacctctgcctgctggccgccaccatcgaattcctgcacacctccactctgctgcacgacgacgtggtcgacgcctccggcctgcgccgcggccgctccaccgccaatgccctgtggggcaacgcgccgagcgtgctggtaggcgacttcctttatgcccgctccttcgaaatgatggtcgagctgggttccatgccggtcatgcgcatcatatcccaggccacccgggtgatcgccgagggcgaagtgctgcaattgtccaaggtacgcgacgccagcactaccgaagagacctacatggaagtgatccgcggcaagaccgcgatgcttttcgaggcctcgacccacagcgccgccgcgctgtgccaggccggcgaggaacagtccgaggcactgcgccgcttcggcgactacctgggaatcgccttccagctggtggacgacctgctcgactaccgcggcgacgccgcgaccctcggcaagaacgtcggcgacgacctcgccgaaggcaagcccaccctaccgctgatcgtcaccatgcgcgacggcaccgaggagcaggccgcgctggtacgcaaggccatccagcaaggcggcagccaggacctggagagcgtctgtgccgccgtcgaggctgccggcgccctggactataccgccaacctcgcccgcgactacgccgcccgcgccatcgcctgcctggatacgctgccggacaacgaataccgctccgccctggtcgaactcagcgaattcgctgtcgcccggacccactgaaccgggctcgacttgtgacgaacgccgccgttttcacggcggcgttttcgttttgcgacgaaaggcacgatcaagacttgctattacgataataagaattattctcatctcacagtcttgtcacggagatgagcgccatgacttatttgatcgatgcctggcttgatcggccacacccctacctgcggatcctgcaccgggaaaccggggaaatctgcgcagtcctggaagaagacgcgctggacgaactgcgtgaccagggcggccttgacctgcacgagttgaactcgagcgaaccgctgatcctcaaggagctggtacgcaacctgttcctcttctgctacgcccgcgccctgcgctgagcctttgcgatgacgccaggacgcgtcatccgtgcgccgctgcccgggaggcggatcgcacgaacggaggcaaaggcgcctccggccggttccgggaagctcacggacgaccttcccggagtcactttcctcatgtcccggtctttccgcaacgcctcgcccgagcacgccggcagcccctcgccgcgatagggattcctgcctgatccacatcaagccgacctcgcctgaaagccgttacaacagcggcgtgaccgtcgtcctgtcgacggccgcataacgaaaaaaagaatggaccgtggccgaggggaccgccccaggcctacgcctaaggatgaggaaatgcctgcttctttcccgcgcctcggcttgctcggcgcactgtgctccatcgttcccctgctccatgccagcgaaccgaccacggacgctgcgctcatcgaaaaaggccgctacgtggcccagctcggcgactgcatcgcctgccataccggcccgcagggcgcgccgatggccggcggcctggagctgaagacgccaatgggtaccatctactcgaccaacatcactcccgaccgggagaccggcatcggccgctacagcttcgaagagttcgaccgcgccatgcgcaagggggtgaccgccgagggagtgaatctctatccggcgatgccctacccgtcctacgccaagatcagcgaagaagacatgcgtgcactgtacgcctacctgatgcacggcgtgcaacccgtcacccaggcgaatacgccgagcgcgatgagctggccgttcaaccagcgctggggcctgtcgctgtggaactgggcgttcctcgacgacgcgccgttcaccccctccagcgacgcgggcccggtgatcaaccgcggcgcctacctggtacaggggctcggccactgcggcgcctgccatactccgcgcggcatcgccttccaggaaaaagccatgagcgaagccggtcgttccgggcagttctacctcgccggagaaaccgtcgaacaatggcaagccctgagcctgcgcaacctgtggacggtggaggacaccgtgcagttgctgaagaccgggcagaaccgcttcgccacggtgtccggcagcatgaccgatgtcatccaccacagcacccagcacttcagcgacgacgatctgctggccatcgccagctacctgaagtccctgccggccggcaaggacgacctgcccatgcccgacagcgaacgcccactggcagcaccggtcgacctgtacagctcgcggggcggtctcggctacgcgcagttctgctccgactgccaccgcaaggacggcagcggcgtcccgggcatgttcccgccgctggccggcaaccccacggtcgcttcggccaacccgagcacgctactgcatatcacccttaccggttggaaaaccgcgcagaccgcaacccactcgcgggtctacaccatgcccggcttcgcccagctggaagaccgcgaaatcgccgagatcctcagcttcgtccgcagcagttggggcaaccagggttcgtcgatcgatgccggccaggtgaagagactgcgccagcggatcgaggccggcaacggcccggccacgaccttcgtctctccacgcctggcggacatgctcgcggcgccgaacgccgaacaggtggtacgcggcatgcgcctgcacctggagacccgcgagctgctgccggcgaacgtcggcaaccagttgaactgcaccagttgccacctgaacgccggaaccgtagccgacggctcgcccttcgtcggcgtctcggcgttcttccccagctacgcgccccgggcgggcaaggtcatcggcctggaggaacgcatcaacggctgcttccggcgctcgatgaacggtaagcctctgccgccggactctgccgacatgcaggcgatggtggcctacttcgactggatgaagaacaacacccggccgcaggacaaggtcgccggccgcggcgtcggcaaggtcgacccggcgctgaagcccgacccggagaacggccgcaaggtctacgcccgacaatgcgcggtgtgtcatggcgagaatggcgaggggctgaggaacagcgccggcgagatgctcttcccaccgctgtggggcgacgattcgttcaatatcggcgccggcatggcgcggaccttcaccgctgccgccttcgtcaagcacaacatgccgatcggcttccaggaacgcttcccgctcggccagggcggcctcagcgaccaggacgcagtggacgtcgcggagtacttttcgcaccagccgcgcccggacttcccggacaagatcaaggactggccgaaggacaagcgtccgctggatgcccgctactgatgccgcaatgaaaaacgccccgtcgatgcgtcgacggggcgtttcgctccttcctggggccgatgcgcctcagaggatttccagcagttcgacgtcgaacaccagcacgctgtgcgggggaatgctgccgaccgcctggccgccataggccagttcgctcggtacgtgcaggcgccacttggagccggcgttcatcagttgcagcgcttcgacccagccggcgatcacgccgcccaccgggaactcggccggctggccgcgctggtaggagctgtcgaatacggtgccgtcgatcagggtgccgtggtagtgggtgcgcacggtatcctcgcgggaaggcttggcgccctcgccagtgctcagcacttcgaactgcaggcccgagggcagcacggtcacgccttcgcgcttggcgttctcggccaggtaggcgcggccttcgccagcggcggcttcggccttggcctgggcttcggcctgcatgcgctcgcggatcacctggaagctggccgacagcgcctcgccggaaacccggctgtcgatacctgcgaacgcatcggacaggccggccaggactgcgtccagggtcatgcccggaaccggattctcgcgcagttggtcgcccagttgacggccgatgccgtagctgacacgggcttcgtcagtggtcaggttgagttcgctcatggcgctgctccgctgtggggtcgaaaaagggcggccagcctagcacagaaggcccttcccccctaccggcgcagccgcttgtgctcaaccctggcggatcgacagcggcagcccgccgataaacgaacccgactcggccaggagtccacacatctcgtcatcgacatcggcgcacaccaactccaccggaaccctgtccagcccgcgcagtacctggcgcgcatgctccacggagcgcaggctgaccggctggccgagatcgtcctccaccggataggcgcggtcgcccatctgcgcctccaggacatagatgccgccctccagcgacaccaggtgcaaggcgtcgatatgtccggcctggacccggccggcgagatcctgcatgttcatcgcgaacctctcgaggttgcgcaggcagcggaagcctccaggtttccgccaaccgcctcggtcccgacagcgccggcccgattcccggcatcgtccggccggcaggccccgacgatgcgaaggacgcccgctcccggcgtccgcccgatatcacaggaaagtcttgcccaggcggcaggcaacgcaagccggaaacgccgccgcccgtccgttttacaacggccgggcggcgcgagcgaaacactggagagggtcgtcagtgacgggtctgcttatccaggtagcccatggcgaacgccgagagcacgaaggtcatgtggatgatcacgtaccacatcagcttgttgtccggcacattcttcgcgtccatgaagatgcgcaacaggtggatcgaagagatcgccacgatggaggcggccaccttgttcttcagcgagccggaatccatcttgcccagccagctgagcttttccttgccttcgtcgatgtccagttgcgaaacgaagttctcgtagccggagatcatcaccatgaccaacaggccgccaaccagagccatgtcgatcagtgagagcaggaccaggatcaggtcggcctcggccatcgcgaagatgttcgggatgacgtggaatatttcctggaagaacttgatggtcaacgccagcagcgccagcgacaggcccatgtagatgggagccagcagccagcgcgaggcgtacatggcgttttcgaaaaagcgttccatggtctcttgtgtgtatgtgcaggggaaaatggggcggcgagtataacgcagcgaccggcggtttttatccagaaaatctgtggataaatatgtgcaccgagccgggatggatcccgccagcgatgatggcacggggcctcggccggattgctcaggctttgcccaggcgccgctcaggattccgggcgaaacaggtagtcgccgacatgcggccgtcgttcgccattgagtcggcgcagttcgccctgcaggtgcaggcgccagatcggcgggtcgacggcttcgatatagccttgctgggccaggcagtcggcaatcgcctgcaacaccccttcggccaccagcggtccgtggaaggggccctgggccttgatcgccgaaggctgggagccggacataccggcggcgcaaagcagggtccagagtccgttctctccggccagcggcctgaccacgcattcgattcgcgtggtcagccccagacaagggcggatgaggcagaggttacgcggcatggcggcatcctcacgggggttcccagttttgagcctacacctgccgccaggttccgcatagcgccggcgggaacttgtccacagggctgaaacgcacgagggcggggctttccagccccgccctcgacaggttccgacagcgcgccaggctcagtccttcttcgccgcggccttgtccttcgccacgacggtctctttctccgccggcttgtccttttccttgtcgtcctcttccatgccgagttcggatatctcctgcaagcgcgccacgaccagatcgttcacgctgcctttcgggaagcgtcccttctcgtcctgggcaccgaccggcttgcccaccagcagcgccagcgcctcgtccacctcgcgcaccgcgtagacgtggaactgcccggcgcgcaccgcctgcaacacgcgctcgtcgagcatcagggtagtgacgttggcgcgcgggatgatcacaccctgctcgccggtcaggccgcgcgcttcgcagaggcggaagaagccctcgatcttctcgttgacgccgccgaccgcctgcacctcgccgaactggttgatcgagccggtaatggcgaagcactgcttcaagggcgtccgcgacagcgccgagatcagcgtgcagacctcgcccagcgaggcgctgtcgccgtccacgtagccgtaggattgttccagggcgatgctggcggagatttccagggggaactcctgggcgtagcggctacccaggtagccggtaaggatcatcacgcccttggagtggatcggctggccgaggttgacttcgcgctcgatatcgacgatgccgctgctgcccggatagacggtcgcggaaatccgcgccggcacgccgaacaccgagtcgcccacctccagcacggtcagtccgttgcacttgccgaccgcggcgccagcggtgtcgatcaggatgatccccgccagcatgtcgtcgaggatccgcgccgacacccgtccggtgcgggtctgcttggccttgagggcacgctcgatgtggccgagctggatcacctcctcgttcgccagctgacggatgaaatcggcttcgctgaccaactggaacagatcgccgatccgtgccgaaagccgcccctggtgctcggccaggcgcgcgctgtaggtcgccagtcgcgccaccgccgcgccgctgaggggcgccatgccctcttccgaggtgcgcgtcttgagcaactgggcgaactgttcgaggctgtcctcgcccagcgggatgtcctcgtcgaagtccaccagcacccggaacatctcctggaagtccggatcgaggtcctgcagggtgtagtagatctgccgcgagccgatgatgatcaccttcagttgcagcgggatcacctggggggtcagggaaaccgcagccaggcggccgagttcggccagcggcgactccatcttcaactggcgcgactgcagggcacgcttgagcgcgtcccagacgaacggctcgccaagcatcttttccgcttccaggatcaggaagccgccgttggcccggtgcagcgcccccggacgcaactgccggtagctggtgtagagcgccccctggtccgagctgtactcgatgcggccgaacaggttgtcgtaggtcgggtgcgactcgaacaccaccggcgcgccgctggtcgcgtggtggacgatggcctggttcggcgcgtactgctcgatcagcccttgcttgcgctgggcgtcggtgcggctgtcgtcgaccagttggtcgaccacggtcttcagcaggttcagttgcatcgcctgcaggtaggcgcagacgcccgggttgttgttgtacttctccaccagaggcgccagcaggggctgcagggccagggtgatggtttcctcgttgagctcgcgcaactggttgctcgactcgcgcttccactgcggcaggctcgccagttcctcgttgaggtactcctcgagggcggcgatatccttgtggaaacgctcgcgctcggcttcgggcaactgggcgaattcggcctcgtcgagggccttgccgtccttcatcggggtgaaggcgacgttggcgctgtcgcggtacagcgccacgtccttctccagggcgcgccgctccaccgagtccagggcgcggtcgtagcgctggttgaaagcgcggtcgacggcgttcttcttctgctggtaggccggatgctcgaagaccgccgggaaggtcgacatcaggttgtcgatcagacggtcgatgtcggcgctgaattcggtcgcgctgcccggcggcagctcgatcacccgaggttcgcgcggctcgtcgaaattgttcaggtagacccagtcggagggcgtggcgacgcgcttgccctcggcttgcagatagcgtttgacgaaggagaagcgtccggtccccggctcgcccatgacgaatacgttgtaacccggacgcggcatcgccacaccgaactgcagcgcctcgaccgcacgctcctggcccagcacgccgcggaagggctccaggtcatcggtggtgtcgaaggcgaattgctcgggagcgaacgggcgggtcagttcttctggcgccaggcgcaggccggcagcgacggaatcgggcatcgggaatccttgcatcgggcggcagatcgccgcggggtgtcgtcgcccgcattctccccccagcctcgcgccactgacaaggcgcggatggcgctatctcaccgatgtaccaggtcggcgcagcgcaggcagtattccgccgcaggcagggcggccaggcgcgccggttcgatggcctcgccgcagcgctcgcagtagccgtagcgaccttccgccaggcgcaggcgggccaggccgacctgacgcatccccgcctccgcctcggcgagcaggccttcgagcacttcgtcgttctggcgctgcaccgcctgctcggcgaagtccggcgaatggctgcgcgccaggtcccgacggatcgccgcggcgcgtgccgcgtactcggtcgccagggtttccagggcggtagcggggtcgaaagcgctcatatccacctcctgcatgaggaacggctgaccaaggccggtttcgctcagaccgaccagaactttcccaagtctggacggttccaagcggattgccgctgacgccggtcaattttcgcccggcattgcgcgctgccacccattcggtgccttgacaccccggtggcattccgaaaagctcacggcgtcgctggcccgctccagatggctccgatccacctcaagagagaacaaacgatgaaacggattctgctcggtaccctgttcgccgccgcctccttcaacgctttcgccgacgctcccggcggcgccggctgcggctggggcaacatgctcttcaaaggccagcgcggcgtggccacccacgtggtcgcggcgaccaccaacggcacttccggcaacaacaccttcggcatgaccaccggcaccaacggctgccataccaacggcgcgctgtcctatggcggcaagcccctgctggtgctcggcagcatgatggacgagctgtccgaagacatggccaagggcaatggcgaagcgctgaccacctatgccgtggtgctgggcgtgcaaccgcaggaccgcgagcacttcgccgccgtcacccatgagcatttctccgagatcttcaacaagtccgacgccaccgccgccgacgtctatgccaacacccaggcgatcctgaaacaggacgcccgcctggccaagtacgccgagcaggcctgagcctcgccgcctgcccgttcgcgggcaggcccctttccccaagcattaagccttgccgatgccgaaacgcctgttgccctggatggcgctgtgcgcctgctccccccttctggctgcgcccacggttcccgaggcccgcctccagcaactggccgccgatccctactggatcgccctcggccactacgaacgcggcaagctcggcggttggcgcagctacgtcgacgacgagctgttcttcctcgccgacaacggcgagagccacccggacgccgaactggcggccacgctaaaggcgctctatgcctcgcccagccttggcgacaagcacgctcagtgcgtctacccggcgcgcacccgctggctgcgccagcaactgcaactcgacgacctgccgcagccgcagtgcggcgaatacgacaactggtaccgcgacatcaacccgcacagtgcggtgctggtgttccccgcggcctacctgaacagcccgtcgtcgatgttcggccacaccctgctgcgcatcgaccaggccgacgtcaccagcaacaacactgccctgctcagctacgcgctgaacttcggcgcctacatcgaaggcatggacaacagcatcctctatgcctggaaaggcctaatgggcggctatcccggcctgttcgcgctggtcccgtaccgggagaagctggccgaatacagccgcctggagaaccgcgacctctgggaatacaagctgaacctcacgcccgaggagaccgggcgcatggtcgaacacgtctgggaactcaagcaggtccgcttcgactactacttcttcgacgagaactgttcgttccgcctgctcgaactgatggagatcgcccgcccgggcatcgagctgaccgagcagttcccgcttaccgcgatccccaccgacaccgtccgcgcggtgaagaacgccgggctgatcgagcgcatcgactaccggccgtcgcgcgagaaggaactgctcgcccgcgccgaaccgctcgaccatgccgagcgcgactgggccaagcgcctggcggacgacgacagcctgctcgacgctcccgacttcaaggccctgccgatgccgcgccaggcgctgatccaggacgccgccttccgcctggtgcgctaccgcgccaccggccaggcgcgtgacagcggcatcgcctcgcgcagctacaacctgttgcgagcgatcaaccgcaacccgccgccggacctccaggtcgagcgccccggccagccggaagacggccacgagtcacggacctggcagttcggcgtcggcagccgcgatgaccgcgccttcgccgagtacggcctgcgcatggcctaccatgacctcgccgataacgcctatggcttccccctcggcgcgcagatcgagatcggccagctcaagctgcgccagtacgaaggcaaccgctggcagttgcagaatctcgacctggtcaccatccgctcgctgaccccgcgcaaccagttgctcaagccgctgtcctggcaggtcgccggcggcctggagcgggtgccgggcgaggacggcgacgaaaacctagtcagccacctgaacggcggcgccggcggcagctggatgttcggcgacgacttgctgctctacgccatgggcaccgcgcggatcgagaacaacagggacttcgccgccgccatcgccccggcggtgggcttcgacagcggcttgctgtggcgcaacccgctgggcaacctgaccctggaggccaagggcgactacttccacaacggtgaagtgcgccgcagtttgggcttcgtccagcaggtggagctgggccgcgacctcggcctgcgcctgagcgccgaacgcgagttcagccatgtcggcaagccgatcaacgaggtgaagctggagctgcgctggtactactactgagccagcctccggcgcacctccatcagggcgaagccgagcaggttgaggccttgccaggtcgccggctcggctgccaggggatcgctcgcggccaggccgatgccccagatcgcgtccaccgggctggcctcgaccagcacccggtcggcggtgcccagaaggtatttcttcagcgaagcgttctggccgaacttgccgaggttgccttcgatcacgattcccacccgctcggcgttccagcgtgcctcgtcgaagccggcgacttcgcggccgagggccttcgcctcgcctgggctgcgcgccgccaggatgcgctcgagcaacctagggtcgtcgaacaagcgtgccttggccgccatcatgtaatgctcggcgctggcgtagcgcaccccgtcgagcttgaacgaagcctcgtaccactggctgaaacagctcttgccgaccttgtcatccgtcgccgggcgatgtccccagaaatacaggtatttgaagctttcgccggccgcgcagcgctggcgcagccgctcgacgtccattatctcgctcatcggcattcgtccctggagcccgtgaaaagacgccaaggatatcccgaagtggtgttcaggcgcgtatctgcgcccagtccaggccgaaacgcgccaggtacttgcgcagccggtcggcatcgttggggttgcgcttgtcctggcgcgaaacggcgaacagccggcgtcccgcctcggaaagggtcttagccccgcggcacacctccagcaccgcctgcagttgcaggcggtcgaacagatccaaggcctccacccgctgccccagcagatcggccagtggctcccggcccgcatcgagcccccaggcctggcgcaggcggaggatctcctcctcgaccagcgcctcgtcgatccgcccgctgtcggccagggtcgccatccgtgtgatggaagccgacagctcgcggaagttgccggcccagcgcgcttcgctggaaccggcgaaggccaggtagcgacgcttggcctccaggttgaaacgcacctgccgcccttgctcgcgggcgtgccgctccagttcgaagtcgatgttcggctcgatgtcctcgcggcgtccagccaggcccggcagctcgaaggtccacaggttgatgcgggcgaacaggtcctcgcggaacaggccttcggccactcgtccgcgcaagtcgcggtgggtcccggcgataagctggaagtcgctctccacctcacggtccgaacccagcgggaagaagcgcttctcttcgatagccttgagcagcatcgcctgttcgtcggcgcccagctcgccgatctcgtcgaggaacagcatgccaccgtcggctgcgcgcagcaggccttcgcgcgcattctgcgcgccggtgaaggcgcccttgacgtgaccgaacagtgccgacatcgcgccgtcgccgcgcaaggtggcgcagttgacctcgacgaaacgcccgtcgagctggtgccggctgcgcttgagttcatagatgcgccgggcgaggaacgatttgccggcaccggtcggccccaccagcagcatgggtgcccgcgaacgcacggcgacccgctcgatctgctcgatggagcggttgaaagcggcattgcgcgtggcgattcccgacttgagcaaagccaggctttcctcctgttcgcggcggaaccgcgaggcgatgcggtcgtagcgggacaggtcgaggtcgatcagcgtcgccgagccctcgggatggcgcgcctcgtccttgcgccgcgacggcgaggtctgcaccagccgggccggcaggtagcgcgcctcggtaaggaggaaccagcagatctgcgcgacatgggtcccggtggtgatatgcaccaggtagtcctcgcgctcggtgtcgaaggggtaggcgctgacgaaatcgtgcagggcgccatagacctcctcgaagtcccaggggttgcgcagttccatctgctgcaggcggacctcggtatgcggcgacaccgcggcgatgtcggcgcgaatccgctcggccaggccgaggtcgcgggcgtcgttgccgtggatcagttcgaggcggtcgatcagcaggtccggctgctggcacaggccgatgctcggccgccacttttgccagcgcgccgcgcccttgccgagacggtcgagggtggcgccgatgaagccgatggcgaccgtgcgtttcatcactgcttatccttcaagataaagatcgatatgaaaatatatagaaatagccaggcatctctccatcgagttcgccgacgaagcgcaataaaaaatttattcaactttaaaatcaaatagttaagcaagaaacagtctcatcgataaaaacctggcacgccgctcgctatatccatttcgaccgcatcgcccatgcaggccgacgggtcgggactccagtcccgccggtgcccgagcccacccctggtgtcggcgtcgtgcatgccgcccgcaacaacgacggtcattcgcgaatgacggcaatgccgcttcgcggttcgatagctcagcctggtagagcaaccatccacgaaatggtctgtcgcgggttcgactcccgctcgaacgttgccttaacggcaatcactcaatggcaacacccgccggtgtggccgaggcgaactgcgcaagcggccaggaaggccggacaacgcaagggagccgaagccgccgccggcccgtccggcccgcggttcgggcacggggcaaggcaggccggggatcgagggaatcgatcgtatggacaggacgtccgccaggccaacctcctccgcgctccacccgcgacgctcgacgggccggcaacaccggcaccacggaagaatgaaaggaatgaagagatgaaaatgctgaagcgctttatcgtgaagaagaacgaacgcggcctgctgtactccgaaggcgacttcctcgccgtgctcgaaccgggcacctaccgccgcttcgatccgtacgaccgcctgagcctggaaagcttcagcctgaacaccccgcagttcgaacaccgcctggccggctacctgcggcagagcgaaccgcaactggtggagcgctatttcacccggatggacctgggcgacaacgaggccggcctgcgctacgaggacggcgtgctggtggagctgctcgcaccgggcagccgccgactgtactggaaaggccagaccgagcagcgcctggagcgcatcgacctgacccaggactatcgattgtccgccgcgctggtcgcccagttgcaccagccgaacctgcgcggccgggccctggcgggcctggacgcagtgttgctggtccaggtgccggcgttccaggtcggcgtgctcaaggtcgacggcgcccttgccggcctgctgcaagccggacaatacggtttctggcgctacaaccggcaagtcagcgtggaactggtcgacacccgtatccaggcgctggaggtcagcggccaggagatcctcacccgcgacaaggtcagcctgcgcctgaacctcgccgccaactggcgctacaacgacgtactcaccgccttctcgcggctgagcaagccgctggagtacctgtaccgcgagctgcagttcggcctgcgagcggcagtgggcacccgcaccctcgacgaactgctggagaacaagcagtcgatcgacgaagcggtcagcgcccacctggccgccaagctggaagacagcggcctggaagtgagcggcctgggcgtgcgcgacatcatcctcccgggcgaaatgaagaccctgctggcgcaggtggtggaggcggagaaggcggcccaggccaatgtgatccgccgccgcgaggaaacctcggcgacccgctcgctgctgaataccgcgaaggtcatggaggaaaacccgaccgcgctgcgtctgaaggaactggaaaccctggagcgggtggccgagcgcatcgaccggatttcggtattcggtggcctggaccaggtattgaatggactggtcacgctgaagcaggcctgatcacgaacgatagccgcgccgtcgacaagacggcgcggagcacaaggaaagcacgatgaaagacatgaatatcctcgaagtggccggcggcaagccgatcaagctctggacccagggcgtcccggtggaggaggaagcgcgccagcagttgctgaacacggcgaagatgcccttcatcttcaagcacctggcggtgatgcctgacgtacacctgggcaagggctcgaccatcggtagcgtgatccctaccctcggcgcgatcatcccggccgcggtgggcgtggatatcggctgcggaatgatcgccgcgcgcacctcgctggtcgccgccgacctgccggacaacctgcacggcctgcgcagcgccatcgagcaggcggtaccccacggcaagaccttcggccgccgcgaccgcggcgcctggcacgaggtaccggaggccgccgaccaggcctggaaggcgctcgccggtcgcttcaaggcgatcaccgacaagcacccgaggctggagaagaccaacaaccgccagcacctgggaaccctcggcaccggcaaccacttcatcgaggtctgcctggacgaggccgaccgcgtctggttcatgctgcacagcggttcgcgcggggtcggcaacgccatcggcaacctgttcatcgaactggccaaggcggacatgcgccagcacatcgccaacctgccggacaaggacctggcctacttcgaggaaggcagccggcacttcgacgactacgtggaagcggtcggctgggcccaggatttcgcccggcagaaccgcgcgctgatgatgcacgcggtgatcgaggcggcgcgccaggtgatccgcaagccgttcgaagccaacctggaggcggtcgattgccaccacaactacgtgcagaaggagcgccacttcggccaggaggtactggtcacccgcaaaggcgcggtgtccgcgcagaagggccagctcggcatcattcccggctcgatgggggcgaagagcttcatcgtccgcggcctcggcaaccaggaagcgttctgctcgtgcagccacggcgccgggcggaccatgagccggaccaaggcgaagaaggtcttcagcgtcgccgaccaggcgcgcgccaccgcccacgtcgaatgccgcaaggacgccgacgtgatcgacgagatcccgatggcctacaaggacatcgaccgggtcatggaagcccagcgcgagctggtggaagtgctgcacaccctgcgtcaggtggtgtgcgtgaaaggatgacgggcgccctgtggcgcccgctggggaagaatcgaaatgaacagggaagaacgccatccgctccccgccgccatgcgcgagcgggtactggatgagctggaacggatcgaacgcgagcacgacgtagtcgtgctctacgcctgcgagtcgggcagccgggcctggggcttcgcttcgccggacagcgactatgacgtacgcttcgtctatgtgcatcagcccgagtggtatcagcgcgtcgaggaacctcgcgacgtgatagaacgcccgctgagcgacgagctggacatcagcggctgggagctgcgcaaggcgttgcgcctgatgcgcaaatccaacccggccctgctggagtggctcggctcgccgctggtgtatcgggaagatcctggcgtgcgcgaggaactgctctggctgggcaacgcctttcactccgtacctggcagccgccatcactacctgtcgatggcacgcaagaactaccgcggctacctgaagggcgacagcgtccggctgaagaaatacctctacgtcctgcgcccgttgttcgcggtgcgttggctggatgcaggcctgggcttgccgccggtggcgttcgagaggctagtggaagccacgctggacgacccgtcgctgcgcgaagaactggatgccctgctgagcctcaagcgtcagcgcgacgaatcggcctacggccctccgcgcctggcgctgcaacgcttcatcgaagcggagttgctccaggccgaacgaggggccgcccaaccaaccggcgcgcgccaggacagccgactgctggatcgctacctccacgacaagatatggcaatacacaagggaaacctcatgagaaaggacctcatcgaactcgacggcagcgaaggtggcgggcagatcctgcgtagcgccctgagcctgtcgatgaccagcggccagccgctgcgcatccgcaacatccgtggccggcgcagccgtccggggctactgcggcagcacctcaccgcggtgcgcgcggcggcggaaatctgcgcggccgaggtcgagggtgccgagctcggctcacgcgagctggcgttccggcccggtgcgatccgcgccggcgactacgccttcgccatcggctccgccggcagttgctcgctggtactgcaaaccttgctgccggcgctgctcgcggccaacggcgaaagccgggtgaggatcagcggcggcacccacaatccactggcgccgccggcggactttctccgcgacagctggctgccgctgttgcagcggatgggcgcggaagtcgacctggaactgctgcgccacggcttcgtacccgccggcggtggcgagctgctggcgcgggtacgcccggcgcgctggcggccgctgcaactggagcatcccggcgcggcgctgcggcgccaggcgcgggcgctgctcgcagggattcccgggcacgtcggcgagcgcgagctggagagggtccgccagcgcctcggttggagcgacgaagaacgccagctggagttcctcgcggaggaccaggggccgggcaacgccctgctgctgcggatcgactgcgagcacatctgcgcgaccttctgcgccttcggccaggccggcgtcagcgccgaacgggtggcggaacaggtcgcgacgcaagccatcggctggatggaaagcggctgcgcggcggacgagcacctcgccgaccaattgctgctgcccatggccctggccggcgccggcagcttcaccacgccgcggctgagcgcccatctacaaagcaaccgccgggttatcgaacgcttcctgccggtgaggatcggcgaccaggcgctggacggcggcggtcatcgcatcgtcatcacatcggcttgacgaattcctcaccaatgccgacctagactcgcgccggacctgccagcgggcccggcgcgaatctccgggagccccatcccggcggtcgaggagtcccagccatgtcttcttcgcgtctcggcgtgcttgtcctcgccctgatcctgctcaccgccaccctgctcggcggctgcgaaagcacccaccagtacctgctcgccaagggctacccgcccgcctatgccgacggtttcgacgacggctgcggcagcggccgccaggcggccggctcgatcagcggcgaattccgcaaggacgtcccccgctacctgcgcgaggcgatctacgccagcggctggggcgacggcttcgagcaatgccggtcgatggcgcggagcgaagagcggcggcgtttcgaggagcgccagtgggacgaccgcgacgacgattggcagcgcgaccgcgaccgcgcgttggcccgggccttgcgcgagcgctgaagcacgctgcgacaaccatccgcagcaccgatcccggtgcgcttgatccacgtcaagccgagcagcgcgccgctggcctctcctcacaggaccggttgtaacgcctgataaggagaaaaaaagatgcagtcctcgcaactgctcccgcttggcagcctgttgctgtcgttcgccacgcccctcgcccaggccgatgccctgcacgaccaggccagcgcgctgttcaaacccatccccgagcaggtcaccgagctacgcggccagcccatcagcgagcaacagcgcgaactcggcaagaaactgttcttcgacccgcgcctgtcacgcagccatgtgctcagttgcaacacctgccacaacgtcggcaccggcggcgccgacaacgtaccgacgtcggtcggtcacggctggcagaaggggccacgcaattcgccgacggtcttcaacgccgtgttcaatgccgcgcagttctgggatggccgcgccaaggacctgggggagcaggccaagggtccgatccagaacagcgtcgagatgcacagtaccccgcagttggtcgaacagaccctgggcagcatcccggaatacgtggacgccttccgcaaggccttccccaaggccggcaagccggtcagcttcgacaacatggcgctggccatcgaggcctacgaggcgaccctggtgactccggactcgcccttcgacctgtatctcaagggcgacgacaaggccctcgacgcacagcagaagaaaggcctcaaggcattcatggacagtggctgcagcgcctgccacaacggcatcaacctgggcggccaggcctacttcccgttcggcctggtgaagaagcccgacgccagcgtgctgcccagcggcgacaagggccgcttcgccgtgaccaagacccagagcgacgagtacgtattccgcgccgcgcccctgcgcaacgtcgccctcaccgcgccgtacttccacagcggccaggtctgggaactcaaggacgcggtggcgatcatgggcaacgcccagctcggcaagcagttggcgccggacgacgtggagaacatcgtcgccttcctgcacagcctgagcggcaagcagccgcgcgtcgaatatccgctgctgccggccagcacggagaccacgccgcgtcccgcggaataaccgccacaaggaaaaacggggctcccctggagccccgtttttcctctatgggacgacctcagaccacgccctgcgccagcatcgcatcggcgaccttgacgaagccggcgatgttcgcccccttcacgtagttgacccgcccctgctcctcgccgtacagcaggcaggcatggtggatcgactgcatgatgccgtgcagcttggtatccacctcgccctcgctccaacgcaggcgcatggcgttctgcgacatctccaggccgctcaccgccaccccgccggcgttcgacgccttgcccggcgcgtagaggatgccggcctcgaggaacaggtcgacggcttccagggtcgagggcatgttggcgccttcggcgacacagacgcagccgttggccagcaggcgccgcgcatcctcggcatccagttcgttctgggtcgcgcagggcagcgcgatatcgcaggccaggccccagggccggctcccttcgagaaactgcagggaaaactgctccgccatctcgcggatgcgcccgcggcgcacgttcttcagctccatcaggtattcccactgctcgtcggagagccccgcctcggcatacagggtgccttcggaatcggacagcgagatcaccttgccgcccatttccatgaccttgcgcgccgcgtactgggcgacgttgcccgagccggagatcgccacccgctggccgtcgaagccgcggccacgatccttgagcatttcctgggcgaagtagacgcagccgaagccggtcgcctccgggcggatcaggctgccgccatagctcaggcccttgccggtcagcaccgaggtgaactggttggacaggcgcttgtactggccgaacaggtagccgatctcacgcgcgccgacgccgatgtcgccggccggcacgtccaggtcggcgccgacgtggcggtacagctcgctcatgaacgactggcagaaacgcatcacctcggcgtcgctcttgcccttcggatcgaagtcggagccgcccttgccgccgcccatgggcagagtggtcagggagttcttgaagacctgctcgaaggcgaggaacttcagcaccccgaggttgaccgagggatggaagcgcaggccgcccttgtaggggccgatggcgctgctcatctgcacccggtagccacggttgacccgtacccggccctggtcgtcgacccagggtacgcggaacaggatcgcccgctcgggttcgacgatgcgttcgatgatgccggcttccaggtagtgcgggttggcctcgaggaacggccagagggaacgcagcacctcttccaccgcctggtggaattcgggctgatcgggatcgcgccgcttcaggcgctcgaggaaagcgtcgacggattgcgtcatttttctcaccggtttctagttttgtgaacaattttttgcgcgtgactctaacaagccaggcggcacctagaaagtgcgaaatgacgcattgatgaatctttatggtgcaaaactgaaactttccgggtccgccagaacggctcgggccagagcacgcgcccggaaccaggctgcctcccgggctggccacgcactgttgaagggcgacgaaagcaccgttcgcgtgcatcccggcgccagatgcgaaagggcctcccccgccagggggaggcccttcctctacctacggccgggtctagaagtcgtaggtcgcggacaggctgaacacctgtcccttgctggttgccctgccatccagccgcccgccgcccaggcgatcctggttgaccgtcttcaacggcacctccttgacgaattgccgcgagtaggccgcgtcgatcgacaactccggcatcgactggaagcgatagccggcgcccagggaggcgaagtagcgatcgccgtcgggaatccgcgggtcgcgggtggcattgtgggtcggcgtctggtcgtaggcgaccccggcgcgcatggtccactggtcggtcaccttgtagtcgccgcccaccgccagggtccaggtgttccggtaggtgtaggggatggagacgatcgtgttgccgtgggacttgagggtcaggtcctggaacgacgaccactcggtccaggtggcgctggcgcccaggctcagacggtcgttgaactggtgtacccaatccagcgaggcgtaggcggggatatccaggcgcgccgaggcggaagcgcccatgcgcaggtccaggcccggataggccaggcccggggtgccgccctcgatggcgccctcggtcagtccaccgtcgtggtcgtagaggttgtagtgccccttcagcttgttgcggatcttcgcgtggtaggcgaagcccagggtgtcgcggtcggtcggcttccacaccgcgccggcgaagaagccgggcgaggtgttgtccaccttgacccgcatcagcgcggacgagttcgaggccgggaacggaatcccgcccatgcccggggagttggcggccgaggcatagagatcgaggttctggctgacgaagccggaggtgcgctggatgatcaccccggcgcccagggagaagttgtcgttgaccttgaacgacagggagccggtcaggccgatcgtctcgatcttggtgtccaccgcgaaatcgcggcctttccagttcgggtcccaggtgctgcgcattcccatcggaacgacctggctcagaccgaaggcgaagcggtcgttgatcggtacgaccaggaagccggtcggcagccacgcgccgaatccggcctggccgccatcgttggtacccagctcgggggtgcccggcccgtcctggtagccgccggtcatgggattaccctggtagtcgtaggcatcgccgttgtacttgatgtcgatatcggcgtagttgaccgtcaactgggcgatccgcttgtcgatgaacgccatggccgccgggttgttgaacgcggcgctcggatcgttgggaaacagcgagccgcctgccatcgcacggccccagcccgccgtgttggtggtcggcaccatgaagccgccggcttgcgcctgggacgtgccgaacagtccgccgacgatcagggcgcagagcaatggcaatggttttctggcaaacaggcaggaaatatcgtttttgttgttcaaggtttcacccctggtggactgctaatgcacggggcacgatggtcggcctgcttgagcgtcctggcggacaccctcccccagaccgttttccatgtgcgaacgaggttctgcgccgcttccggcggaaactccctcggacctgccggcccgcgaaggacgcctggcagcgggagcgcgaaaccgctggcgccgagggcgccagcggcagcccggattacgggttgactacgaaggccggggtcggcttcacgctcaggctgttgatcttgcagttgcctgccagcgactgattgctggcgctgagggtgttggtggcgttgctccaggaaccgttgacggtgctcgggccacaggtagaggagagaatcttgaagccgacgccatcgaccttgccggcagtggtgctggaaacggtcagcttccacggcaggccggtcatctgcggcacgctgcacagggtgttgctgccgctgacggtgacgctgtcgatcgaggcataggagccatcggcggcggtcttgcccttgaaggtgatgttgcaggtcactggcagattgagcgacgccggcgagctcacgctgatggtgccaggtgcggtgaaggccgagttgaccggggtgatggtggccgcgctggccatggacgaaacgctcaggcagagagcaagagcagcaaaggacggcagggacttgatggatttcattgttttgtatccttccagtgagttggcaacgctcgcggttgccgagccttgatcatgcggcaggatcgtcaccgacccgcccccacgaccaccttgtgccttcccgtccgatccacctgccaggcgaaccacaccacccgccttggccgtgcgtaccgggatcgggagaggctttacctcatgagtcctatccggtgccgacgctgacggtccccacgacgagccgggacagaccggatatcggaaagatccgatagggtttgccaacccgccgcgcctcgagatgcccacctggccgacctccgcgaacgcaggcctgacagggctggcaatcaccacgaaggggcagtggaccagtcaacgacgggagccagagtacggtcagcgcggctctggaaaagcctagcgaaagaagggggttgcccctccgaaggaaggtcggtgaatgccgtggagggcggacgaagcgtcgtcgcgaaggaatcctgatacctctgtcaacatccgcgtcgggaagaaacgcaccatgacggggcgtacctaccagaattggcagctcgcgaagccacccagccaacccaaagttaggttgccaactatcggtcggacgaggacggcacgcgaacgagacccggctgcaactcgaacacctccacgccctccggcgtggagcgtccgatcttgacctgttgcgccatcacgctggcgccgggagcctggcgaacgtccacgaacagccggtcaccctcgtggcgtatcgcctccggcggcacgacgatggcctgttcgttgcgataggtggtgaccgtcagcttggcgctcattcccagacgaatcttctgcaactggcggggatcaagcggcgctaccgacaccgtcacctcgaactgcgggctgcctccctgggccatgccgggcagagcctgaccaccgagggcggcgatgacgcccgccagcgtggtgccctcgaagccgtcgccactgatttccaccgcctgcccttcgcgcaactggttgatatccagttcggaaaccttcgcagataccttcagccgctcgacgctggccaggccgaacaacgcctggccctgccccagcttgctaccggcctgcaccggttcgcggctgccctgctcgccagccaggccgggcgccgcgacgacgataccggcaaagggcgcgcgcaccgtacggccatccagctgggcctgcagcgtctcgtatttcacgctggcgttggccaggtccatttcggcgatctggcgattctcgccctgccccttggcgcgggtcgactccacttcccgccgggccgcctccaggtccatgcgctgctggctggcctgttgttcgagatcgtcgagttcgttgcgcgggacgatcccgcgctggaacagctcgcgggtctcgcgcaacttgcgctcggtgctgctctgcgccagctgcgcgctgcgcagggcacgacggacccgcgccatgtcctcgccacgctcccagtcgcgcaggtcctgcagggtgcgacgggccttgagcaacgccgactgtgcctcgcgcacctgcacggcgatctcgcgggtgtccatgcgcagcagctcctgtccttccgcgacccgctgtcccggctccaccagcagcgcctcgacattgccggcgaagggcgccgccagggtcaccacgcgccccggttccaggcgtccgaccaggccgatctgatgcaccagcggggccgcccgtacggcgacccagcgctccccttccgtgcgtttcgcggtgccgccggcgaggaccagccaggccagcgccgcaacaaccgccaggccggcggcgagcgacaatgccggccggcgcaggaaggaaaaccggtcagtggtcattgagcgaaatctcccagctatccagggtcatgccgacgatcaggtcgagctgcgtctgcgcattgagaaacgagatcagagcattcaattgggtgttctcgacgttgcgcaggtcggtctcgaagctcagcacctggaagttgctcgaacgcccgacgcgcagcttttcccgttcgatctccagcttgcgccgcgacaacgcggtggcgcgctgggcgatctggtactggcgccagcgcgtgccgaggtcgcgcaccgcatcgatgacgttctgctccagggtctgccgggcatcctcgatcaggatcttctggttctccacgtcgacctgggcgcgcacctcggcctgccggcggctgaggtcgccgatgggaatttccacctgtaccccggcgtagctgtcccagctgcgtgaattgtcgccaccaccctcgctgtagcggtcgcggatctggctggcgccgcccaccagcgagacatcccacaggcgctggttcttcgccagcaccaggttgaggtcggcctggcgactgccgatcaggcgttgcaggtattccggttgctgctgcagggcggtcctgatcgcctgctggcggtcgacctcgatcggcgtggcggccagcgcatcgctggcgcggatctgcgtcgacaggtccagcgccagcagttgcagcagggccaggcgtgcgctgtcgacctggttggcggactcctcgacgttgagctcctggctggcgacgtcggcctcggtctgcacgatctcgaattcggccattcgcccggcgcggatcatcgcccggttgacctcgagcagctcctgggtccgcgccagggcttcgcgagcgatgcgcgcctgctcctgggcgcgcagcagctcccggtaggcgccgatgacctggctgatggtctgcgacacgctggccttgagttgcaggcgattggcgtcttcggagagacgtgccaggcgcagcggcgcggtggtgacgtcccagcccgcatcgcgcagcaacggctggacgacggtcaggtcgaggccatcgctgcggtagcgcccggcctcgtcggcggtgcggaactgcttgacccaggccaggctgaagcgagtgccatattcgccaagcagggtcgcggtgggcgagacattgctggtcctcgtgcggtcttcggtggcgcggttggcgcgatagtcgccgcgcaccaccagcttcgggttgaaggcgtcggcggcgacgcgcaggtcgaacttctgcgcgatccgttgcaggtaggcgctacggattccacggttgttgcgcaggccaagatagaccgcgtcgctcaggctgaggtcgatcacctgctcgctgagcagcaccgacctgccctgctcgcgggccatgctcggtacgtccggactcagcgccgggttgacgctggccgccaccggaagagcggtgaccagccacagcacgcccaggccccacctattcatcgcgcagcgcctcgaccggttgcaggcgagccgccgagaccgccggatagagcccgaagaacagccccaccagcagggtactgcccatccccagcggcagggccgcgtaggccagggagaaggtccagccggagaacctggcgtagagatacgcagccgccacgccgagcaccgcgcccgagagcgcgcccgcggcggtcagggtcaccgcctcgatcaggaaaagattgcggatgtcccgctggcgcgcgcccagcgccatgcgcacgccgatttcccggcggcgttcggcgacactcatcagcatcacgttcatcactccgacgccgccgccgagcagggagatgatccccagtccggccagcaggtaggtgaaggtccgggtctgccgcttgagtccatcgagcacctgctgcgagacctggacctgcgcctcgtggccgggcaaccgcgccgtcagcgccgcgcccagggccgcgccgacgctatagacgtccgctcccggcgagacccgcgccaccacatggctgacctcggcggccggctgcaggcgcggcatgcccggcgccggcacgaacagcgagtcgttggcggcgaacggcaagagagcggcgctggcctgcggctggagaatgccgatcacgcgaaacagatagtcgttgaccgtcagttgctcgccgaggcgcagcggatcgccgggcgcccccagggcctcggcgattgtcgcgcccaccaccacgtaggtgtcgtgatcgtcgaagcgcgagaggaaacgtccttcgcgcagccgcagcctggcggcagccgcgagcccggcgctggcgccgacgatactggcgttgctggtgcgtccgtgaaaggtcaccggcgccgagtacaggcccagcgccgccaggtgctccagaccggccacgtcgcggagcagcggttcggtgtcgagcgacgccggcatcggcatcggcgcctgcggggcgaacgggaactgcaccaccagggtgtcggtgcccatgtccttgaagatgctcatcgcttcgtcggtcgcgttgctgccgatgttcagcatcgcgatcaccgatgaacagcccatgacgatacccagcaacgccagcagcgagcggcgccccagcccgcgaagactggcgagggcctcgtgaagcaattgccggggcgacgggctggcgctcaccggcaggcctccgccaggtcctcgtgcacctcgccatgccgcactgtcagttggcgcccgagacgggcggccaggctgggatcatgggtgaccaccaccagggtcacctggcgctcgcggttgagggtgaggagcagctccagcacttctttcgcggtgctcgcgtcgaggttgccggttggttcgtcggcgaggatcagcgccggctcaccgaccagcgcgcgagcgatggcgacgcgctgccgctggccgccggagaggtccgccggacgatggccggcgcgctcggccaggccgacccgggcgagcatcgcctcggcccgctccagtgcctcgcggcgcggcatccctcgatagctcaggggcagcgcgacgttgtccagcgcgttcagccgcggcaacaggttgaagctctggaagacgaagccgatcaggcggttgcggatcgccgccagtcggtccccgtcgacgctgaagatgtcgtgctcggcgaagcggtaggcaccgctgtccgggcggtcgagcaggccgaggatattcagcagggtgctcttgcccgagcccgacgcgccgacgatcgcgcagctttctccgggaaagatgtccaggcagacgtctttcagtatctgcagcggctgcccccccaggaggtagcccttgccgatcccccgcagggagatcaatgattcgtgcttgtttgttgttggcattcgcacccgaccgctcgcatcccttcaaggcccgcccggtcgtaccgccgcaaggccggcgatacaggccgaacggccatactgctgatgatggagacagcgcacaagccgccaccaccggcaacgctaccccgaggcgccagcgccgagcgaaggtagcggctggtccgcccggccaatgccggtactcgattccgccgggcttcgccatatggcgcggcctctccgggcaggcggtattgagcgcacggatcggctgcgcagaccactagcagagctgacaccatcgcggccgtcgatgcacccccatctttagttaggtgaaggctcaggcatgctgcgtgggagcctccccccgggtaccgccgatggaggtgtccctgcgcagttcccatgttccccagcgcatggctcgttgaattccaggcatgaaaaaaccgccggccggcaacgccggcgggcggtttctcgagggcgcgcttacgccagtttcttgtagcgcacgcggtgcggctgggccgcggcgtcgcccaggcgcttcttgcggtccgcctcgaactcggtgtagttgccttcgaagaaggtcaccttgccatcgtcctcgtaggagaggatgtgggtggcgatccggtcgaggaaccagcggtcgtgggaaatcacgatggcggagccggggaagtccagcagcgcctcttccagcgcacgcagggtttccacgtcgaggtcgttggacggttcgtcgagcagcaacacgttgccaccctgcttcagggtcagggccaggtgcagacggccacgctcaccgccggagaggtccttgacgaacttctgctggtcggcgcccttgaagttgaagcgaccgacatagctgcgcgacgggacctcatagttgccgatcttgatctgctcgaaaccgtcggaaacctgctcccacacggtcttgttgccttccaggctgtcacggctctggtcgacgctggcgatctgcacggtctcgccgatctcgatggtgccggagtccggctgctccttgccggtgagcatgcggaacagggtcgacttgcccgcgccgttgccgccgatcacaccgacgatggcgcccttgggaatgctcagggacaggttgtcgatcagcacgcggtcgccgtaacccttggtcacgttgtgcagttcgatgaccttgtcgcccaggcgcggaccggccgggatgtagatctcgttggtctcgctgcgcttctggaattcctgcgactgcagttcctcgaagcgctgcaggcgcgccttggacttggcctggcggcccttggcgccctggcgtacccactccagctcggccttcatggccttggcgtgggaggcttcctgcttggcttcctgggccaggcgggcggccttggattccagccagccggagtagttgccttcgaacgggatgccatggccacggtcgagttcgaggatccagccggcgacgttgtcgaggaagtagcggtcgtgggtgatcgccaccacagtgccggggaagtcgtgcaggaaatgctccagccaggccaccgagtcggcgtccaggtggttggtcggttcgtccagcagcagcatgtcgggagccgacagcagcagacggcacagcgctacgcggcgcttttcgccgccggacaggtgctcgaccttggcatcccacggcggcaggcgcagggcgtcggcggcgacttccagctggcgttccaggttgtgtccgtcggatgcctgcaggatcgcctccagcttggcctgctcggcggccagggcgtcgaagtcggcatccggctcggcataggcggcatagacctcgtccagccgcgcctgggcctgcttgatctggccgacggcctcttcgacgatgtcgcgcacggtggcctgcgggtccagcttgggctcctgcggcaggtagccgacgttgatccccggcatcggccgggcctcgccttcgatctcggtgtcgacgccggccatgatccgcagcagggtggacttgcccgcgccgttcaggccgagcacgccgatcttggcgccggggaagaacgacagggagatgtccttgaggatttcacgcttgggcggaacgatcttgccgacccgatgcatggtgtagacgtactgagccaaaacgagcacctcatgaagaaaaggaaaaaaactcggccaagtatatgacagaccgagagaaagctggccagccaccccggttttcgtggggcggggcgctttgccggcggatgttcgccgtccgattccaggccgctacggtgacgctgagcagcgtactggccgcccttactgtctccgctaccctcgtcctgtcaaaggcgttctgcctgagcgaggcggcgaccatcgccccgtgcgaggtctgggtgggcctggcactgctcgcggccatggtgctgccgctcaagacctgacgcgaagcaaggcgtggggagatccagcctgctacaattgatccaaatcagtctcaaaagaacaaaaaaaacctcaaaaatgacactcgctcccagatccgcccagctacccgactccccgcacagggacagtctcgacccagcgccaaccccgtcgtctcaggaccagcgcctgctcaaggccttggccaccgcgatggtcaatcatccgcgcgccaccatgggagaactggcggaactggcaggagtgagcagggcaaccctgaaccgtcattgcggtacccgcgaaggtctcaagcggcgcctggaaagccatgccaggagtaccctcgaacgcctcacccacagcgccgccctgcagcggctggagccgcgggaagcgctacgcgagctgatccgggaacacctcgcccagcgcgacctgctggcgctgctgatgttcgagcagaacccgggacgccaggccgggcatggggacgccagttggcagtcctatgtcgaagccctggacgccttcttcctgcgcggccagcagaagcgtgtgttccgtatcgatatcagcgcggcgaccttcagcgaactcttcatcgtcctgatctacggcatggtcgatgccgagcgccgcggtcgcgcggccagcgccgggttgtccgccacgctggaggagctgttcctgcgtggcgcgtcgaaccccgcacaacctgccagcccttgagcgggcggcagttgccacccgctagcaccgtttcccacacgtttacccgctcaactcctgccgcctcgatgtaccaccaggctccgtccctcgtcccagcctccgccgagcgcgcggaacaggtcgaccagggcgatctgccgctgggtgctgccgtcgatgaaggcgatctcgttgaggaagctgctgcgctgcgcatcgaggtagcgcaggtggttgtcgacgccactctcgtagcgtgccttggccagcttcagggcttcgttgctgctgttcgccagggcgcgcagggccttctcttcgcgacgcagggtatcgctggccgccagggcgtcggcgacctcgcggaaagcggtctggatggtcccctcgtaggcggccaccgccgaatccttgcgcgcctcggccaggctcaggttggcacggttgcgcccgccatcgaagatcggcagcgtcagcgtcggcaggaagctccaggagcgcgagccgccatcgaacaggccggacatttccgcgctggaggtgccgaagctgccggtcaggctgatgcgcgggaagaacgccgcgcgcgccgcgccgatatccgcgttgcgcgcccgcaaacgatgttcggcggcaaggatgtccgggcgtcgctcgatcagctcggacggcgtgccgggagcgatgtcctgcagcagcttcggccgctgccccggactccgcggaatcgcctgcgcggcatcgtcgctacccagcagcaacaccagcgcgttgaatgcctgctgtttctgccgcaggttgcgctcctgctcggcgcgcgcctgctccaccaggccaagggcttcctggtagtccagcgcggtggcggcgccggccgcgcggcgctggtcgatcagggcgaaggaatactcgcggctgaccagggtctgacgggtcagcgccaggcgccgcagggcgccgtcatagctcaggtaggcctggctgacctcggcgaccagggcgatccgtgccgcgcgcgctgcctcctcgctggccaggtactgttgcagggctgcgtcggtcaggctcttgacccgaccgaagaggtccagttcgtactccggcagggccagcccgacctggtagctgctggccacttccgagcgattgccggcggacaggtcggccggctgccgctggcggttgccggtggcagcggcgttcaggcccggaacccggtcggcgcgctggattcgatactgcgcgcgggccgcctcgatatccaggagggtctggcgcaacgagcggttgttatccagggccacgtccaccaggcggcgtagttcggcatcgacgatgaaactcttccaatccagcgtgtcgatcgccgcgccctggcgctgggcggcggcgccgctccagctgtcggccaccggcgcggcgggacgttcgtaggtcggcgccatggagcaggcgccgagggtcagggcgatcagcaacgccgatacgccgaatgcaggtttgcgcatctcgttcactccccggccgaagcggcctgttcgatgggtgccggcttgctgcgcagcagcgacagcagccagacgaaacagataggtacgaacagcacgccgaggaaggtggcgctgagcatcccgccgatcactccggtgccgatggcacgctggctcgccgcgccggcaccgctggccagggccaggggtatcacgccgaggatgaacgccatggaagtcatgatgatcggccggaagcgcaggcgcgcggcctcgatggaggcgtcgcgcaggctatgcccctgctcccagagttccttggcgaactcgacgatgagaatcgcgttcttcgccgaaagaccgatgatggtgatcaggccgaccttgaaatacacgtcgttggacataccgctgaccatcaccgcgagcaccgcgccgatggcgccgatcggcacgatcagcatcaccgacagcgggatcgaccagctctcgtagagcgccaccagcaacaggaacaccaccaggatggcgagggcgaacaggctggtggcctgcccggcggagaccttctcctgataggacaggccggtccactcgtagccgatgccggccggcagctgcgcggccaggcgctccatttccgccatggcttcgccggtactgaagccgggcgcggcgtcaccgacgatgcggatcgacgggtagccgttatagcgcaccaattgcaccggtccctcttcccatttcacgctgacgaaggcgctgagcggtaccaggttgccagcagcgttaggcacgtatagctcgagcacgctttccggggtcatccggttgccctgttcggcctggatcaccacccgctgttggcgccccgcattggtgaagtcgttgatcacctccgagccgaaggcagcggacagcgtgccgctgatggtctcgaagctcacccccagggcgcgggccttctcccggtcgatcaacaggcgcagttgcggcgcttcggccagtccttccatcatcgcgtaaaggaatttcgggttggtctggatctcgccaagaagagtatcgcgagcctgcagcagcgcttcgcggccgaccccgctacggtccatcaggcgcaatgcgaagccgccggagttacccagaccgttgatcggtggcggcgacacggccatgaccgtgccatcgtcgggcagcgcgaaatgctcgttcagcgcggcgatctcggcggcggccgactgctcggcgcctcgctcggaccagtccttgaaggtcgggaaggccagcgcggcattgtcgccctggccggagaagctgaagcccgatatcaggaacaccgaagccaccgcctcgcgggacttgaggaagcgctcgagctcctcgccggtggcatcggtgcgcacgcgcgaagcgccaggcggcagttgcacgtcgaccaccatgtagccgaggtcttccgccggcacgaaggcttccggcaggcgcaggtagaagtagccgagcatggccaccaggccggcgtacaccagcatgaagcgtccggcgcgcgccaccagcttcgagttgagcagcgaatagcgctcggtgacgcgggcgaagccacggttgaaggcgccgaagaagccgcgcttctcgtggtgcccttcgggaatgggcttgagcagcgtggcgcacagcgccggggtgaaggtcagggcgaggaagccggagaacaggatcgagaccgccagcgacaccgagaactgctggtagatcacccccaccgaaccggccatgaaagccagcggcaggaacaccgccgagagcaccagggtgatgccgacgatggcgccggatacctgcttcatcgccttgaccgtggcctcggccggggaaatcccctcctccgccatgatccgctcgacgttctccaccaccacgatggcgtcgtccaccaggatgccgatcgccaggaccatgccgaacatggtcatcatgttcaccgagaaccccagcaggtacatcaccatcagcgtacccagcaggcacaccggcaccacgatggacgggatcagggtgtagcggacgttctgcaggaacaggaacatcaccaggaacaccaggaccatcgcttcgatcagggtgtggatcaccttctcgatggccacgtcgacgaagcgcgaggtgtcgtagggcacgctgtactgcatgtcctcggggaagaacgccgacagttcggcgagacgctgtttcaccagggtagcggtctggatcgcgttggccccgggcgacagctggatcgccccgcccacggtgggcgtgccgttcagtcgcgaggaaatgttgtagctctccttgccgagttccaggcgcgcgacatcggcgagccggaccagcgagccgtcctcgttggcgtgcagcactacctggccgaactcctgcggatcgtccagggtgcccttcaccgccagggtcgccgtcagttcctgcgcggaactgcccggtgcgctgccgaaggcgccggccggcacctgcacgttctgcccgcggatggcattgctcacgtcgtcgatggagaggccgaagcccaccagcttctgcggatcgatccagacccgcatggccgcctcggaagagaagaattgcagcttgccgacgcccggcaggcgccgcagctcgttgttgatattgcgcgcggcgtagtcgccgagggcggtggtgtcgctgcgctgagcgccttccttgtagctgagcgcatagatcagcaggaaaccggcgctggtctgctcgacctgcaggccctgggtcagcaccgcctgcggcatgcgcgcctcggctttcttcaggcggttctgcacgtccacctgggccaggtccggatcggtgcccggctcgaaggtgacgacgatctcggcggtgccgttggagttgttggtcgactcgaagtagagcaggcccttggcgccgttcagcgactcctcgagcacactggtgacggagtccaccagcaccttcgccgaggcgccgggataggtggcggtgatggtgatctgtggcggcgcgacattggggtactgcgctaccggcaatttggaaatgaccagcaggccggccagggagatgaacagggccaccacccaggcgaagttcggccgcttgatgaagaattcggacatcggaaaatcctcggggcgaacccgcccttactgttgcggcgcaggtgactgggcttgcgcctgggcaccatccggcttcggcacgatcttcgcccccggctgcaccgcagccaggccgccgactatgacccggtcacccggctccaggccctcggtgatctgccagcgcgaaccctgcatgacgccggtaccgacgctgcgcgactctgcgcgctcgtcggcgcccaccaccatcacctgggcgctgccgtcactggagcggtgcacggcccgttgcggcaccaggatcgcctggttgtcgatgccctggggcgtacgtacgcgcacgtacatgcccggcagcaggaccccgtcggggttggcgaacttgccgcgcagggcgatctggccggtaccgcgatccaccgccacgtcggcgaactgcaacgcgccctggcgctcgtagggcgtcccttcgacgcgcagggtcagcgcctggctgtcgccggcggccaaggtgcctttcttcagggcgtcgcgcaggcgcagggcctcggccgcggtctgggtgaaatccgcatagatcggatcgagctgctggatgcgcgccatcagcgtcgcctcgccctgcccgaccagcgcgccctcggtcaccagcgcgcggccgatgcgcccggagataggcgcagtgaccgaggcgtagccgaggttcaggcgcgcggtctccaggtcggcctgggccgagcgggtcgccgcctcggcgctgcgcaggtcggcggtggcggtatcgaagtcctgctggctgaccgcctggatcttcaccagcggctcgtagcgacgcacccgcgcctgcgcctcgaacagcaccgcgcggttccgcgccagctcgccctcggcgcgcgacaccgcagccttcagcggtgccggatcgatctggaacagcaggtcgccagccttgacgtcggcgccctcctcgaagcgcttccgcacgacgatgccggccacccgcgcacgcacctcggcgacccgcaccggttcgatccgcccaggcagttccgaactcagcgccaggggctcggcctgcaccgtcaggacctccaccggcaacaccatttcggcggcctcctgtcgctcttccgccggcccacaacccgccaacgcgatggccatagccaacgccccgatccttcctattgcacgcaaatcagccataacacacccgaccgttgattgaaaacggatcgaatggtactttttcgagctaattgagtcaatattgtctcaaatgatctttttacagctaattcctttggacgcgaggccagttttctgcacaatgcgcacaatcagaaaaaccaaccgggacccatcgatgaccctgatttcccatgacgagcgactcatcaaggcgctggcagtcgctatcgtcgaccgcccgcgagcgacgctgaaggaactggccgaggcggccggcgtaagcaaggccaccctgcaccgcttctgcggcacgcgggacaacctggtgcagatgcttgaggaccacggagagaccgtactgaaccagatcatccaggcctgcgacctggagcatgccgagcctctggaggcgttgcagcgcctgatcaaggaacacctcacccaccgcgagctgctggtattcctggtattccagtaccgcccggacttcctcgacccgcacggcgaaggcgcacgctggcagtcctacctggaagcgctggacgccttcttcctgcgcggacagcagaaaggcgtgtttcgcatcgacatcacggcggccgtgttcaccgaactgttcatcaccctggtctacggcatggtcgatgcggaacgtcgcggacgggcggccagctccaattccgcgcataccctggagcagatgttcctccatggcgcctccaatccggctcgctcctgaccctcgcgcccgcggcggcgcccctctcgtcgccgcatggcacggaccgatccgcgtgccgtcgacttcggccgcccggaggcctgctcgacactcgggaagatcagtcgtcaccggtcctgcgacaaagtgcctcgacagccggaaaggaccgtgacgctcgtcggcgatactggcacttggccttgcttccgggcatcctaactgtctaccgaatcacacctcccccaggaattccggtcagtgtcgaccccctcgctaaccccgtcgccgcctcccgccggcgacccactgaccgtacccgaccgaccggcagccaaggctggcctgctgttgctggtcctgttgatgctcggcctgctgctctggcagatgagccaggagctgcgccagcaggaacgcttcgaacacgagcgagccgcggcccagctcgatcgtctcaacgaccgcctgtccctgaccctcgaactcaaggcgcgcaccgccctcgccctgctcccgggcgtgccccccagcgagcgtggcgagatacagggcaggctgttgccgcgcatcagcgatgcgctgccgcaggtgcgccagttgcaatgggtggacagcgccccgcagacggacagcccgtcgccggaaacgacgctgcccgagcagttgcaccagcacgccggctccggcctctaccactattgcctcgacccgcgcgacggcgaatccctctacctgaccctgcgcgaacccggcagccgccgcgacagtggcttctggctgttgcacctggccagcgacagcctcgcccagtggagtcccgacctgcccaccggcaacctgctctggcgcctggaagaccaatacgccgggcgggtgctctggcataccccggggagcacggcgctgctcgacgacatgcagaccctcggcgtggaaccgctgcgcaacagcgactggcagcttcgcgggctctacgacagcacgcgagtgcggctcggcctgctgccgggaatcggcggcgagctggcgatcttcctcctgctggtcggcgtcaccgtgtacatgctgctgcgcctgcaccgcgagcaacagggcctgcgcgccatgaccctggccccgcagcgcagcctgcgccaggcggccacggcactggcggcgatcgacgagcgggtgctggtgacccgcgccgacggccgcctcagctacctcaatccccaggccgaacgcctcttcggcatcagttcggcccaggcccgccagcatcatctgctgggcctgctgccggacctcgagccaggctggctgacggacgccggtggcgacggcgagacccgtagcgagctgctgccgctgcgggtgcgcggcgagccgcggacgttcaccctcagccgccatccgctggccagctatccggcgctcgccgaccaggcctggaccctccgcgagcagatcctccagggcgggcaggtctgggtgttgcgcgacgtcaccgaggaacagcacgccctcggcgtcctggaggaaacccggcggcgctaccaggacatcttcgaaggggtcggcgtggccctctgcgtgctcgacctctccgccctgcgccaggctctggtggaacaaggcctggacagctgcgccgcactgcgcgcctggctcgccggcgaacccgggcggcagcaggcgctgctggagcggatccgcatcaccgagatcaacgatgtcagtcgccgcctgctacagatcgattccaccgaacaggcctggcagcgcttgctcgaccacggcccgctacaaccggacagcctgcgcctgcaggtgatcgaggcgctcatcgaacgccggccggtactcgaacttgaagccacgctgcgctgcggcaagagcacgccgcggcacctgtggttgcaactgcgcctgccggaaaaccccggcgaatggcatgcggtgaccctcagcctgtccgacgtcaccagtcgcaaggaggtcgaactgtcgctgatcgagcgcgagaagttctggtcggacgcggtccaggcggtgcccgataccctctacatccacgacctgcacgcgcgccgggtgatcttcagcaaccatcacctgggccagcaactgggctacaaccaggaagaactggcgcggatgggcgagaacttctgggaaaccctgctgcaccccgacgaccaggaatactactggcgcatccgcaacctgcagcacgtggtcggcgacggcctgctgctcgacagccaactgcgctggcgccaccgcgacggccgctggcactggttcgacatccgcgagcaggccttcagccgcgaccgcagcggtcgcgtggcgcgcctgatcggcgtggccaaggacatcaccttcaccgtcgaggcgaacaacgcgctgcgcgagaacggccgacgctaccgcatgctggcggaaaacatcagcgacgtgatcttctccaccgacgccgagctcaacgccagctacgtcagcccctcggtacagcacgtgttcggctacagcccggaatgggcgctgctcaacggcctccaccagaccgccaccaacccgcgccagctcggccgcctgaacggcctgctgcgccgcgtgcggcacgccatcggcgaccgccagaagctcgccgagctgcgggaaaaccctggccagcatctgttcgccctcgactgcctgcgcgccgacggacgcaagattcccatcgaactgcggatcgtcctgatgtgggacgagcacgaccgcttcgaaggcctgctcggcatcgcccgcgacatcagccagcagcgccgcgccgaacgcgagctgcggatggcggcgacggtattcgaacactccacggcggcgatcatggtcaccgacccggccggctacatcgtccaggtcaacgattccttctcgcgcctgaccggctacagcccggccgacgtgctcgaccagcagccgcgcctgctcaccgccgaccgccaggaagccaaccagctcaagcacgtgctcgccagcctgcagcacagcggcagctgggaaggcgagatcctgcagaagcgcaagaccggcgaactctatccgtcctgggtcggcatcaccgcggtgcgtgacgaggaaggcgacctggtcagcttcgtctgcttcttcagcgacatcagcgagcgcaaggccagcgagcggcgcatccaccgcctggcctactacgacgccctcacccacctgcccaaccgcacgctgttccaggaccgtctgcataccgccctgcagcaggccgagcgcaacggccagtgggtggtgctgatgttcctcgacctcgaccgcttcaagccgatcaacgactccctcggccacgccgccggcgaccgcatgctgcaggaagtggcgacccgcctgagcgcctgcgtcagccaggacgataccgtggcgcgcatgggcggcgacgaattcaccctgctgctgccttcccagggcgaccgcgagatcgccctgaaacgggcgatccaggtcgccgagctgatcctcggccgtctggcccggccgttcaccctggaaggccgtgaattcttcgtcaccgccagcatcggcgtggccttgtcgccccaggacggcgccgaactgagcctgctgatgaagaacgccgacacggcgatgtaccacgccaaggagatgggcaagaacaacttccagttctaccaggccgagatgaacgctcgcgccctggagcgcctggaactggaaagcgacctgcgccgcgcccttgaactgggcgagttcgtcctccactaccagccgcagttcaccggcgacggccgccgcctgaccggcgccgaggccctgctgcgctggcagcatccgcgccgcggactggttccgccgagcgagttcattccggtgctggaggagatcggcctggtggcccaggtcggcgactggctgctggcggaagcctgcaagcagttacgcagctggcacaaggccaaggtgcgggtgccaaaggtctcggtgaacctctcggcacggcagttcgccgatggccagttgggcgagcggatcgccgcgatcctctacgagacaggcatcccgccggcatgcctggagctggaactgaccgaaagcatcctgatgagcgacgtcgccgaggccatgcagatcctctccgggctcaagcgcctcggcctggccatcgcggtggacgacttcggcaccggctactcctcgctgaactacctcaagcagttccccatcgacgtgctgaagatcgaccgcagcttcgtcgacggcctgccccacggcgaacaggacgcacagatcgcccgggcgatcattgccatggcccacagcctgaacctgatggtgatcgccgagggcgtggagagccaggcccagctggacttccttcgcgagcacggctgcgacgaggtgcaaggctacctgttcggccggccgatgcccgccgagcagttcggcatgctctacgccagcgacgtgctgttcatgttcaacgagggctgagccgccgtgcggcgcgcttgagcgccgcttgtccgcgacatgatggcctttcatgtgccagcacccgccgcatgggttagaatgcgcgccttttcccagcaccgatccttatgaggaccgccatgttcagccgtgatttgaccctcgcccgctacgatgccgaactctttgccgcgatggagcaggaagcccagcgccaggaagagcacatcgagctgatcgcctccgagaactacaccagcccggcggtgatggaagcccagggttcggtgctgaccaacaagtacgccgaaggttatccgcacaagcgctactacggcggctgcgagtacgtcgatatcgtcgagcaactggccatcgaccgcgccaagcaactgttcggcgccgattacgccaacgtccagccgcacgccggctcccaggccaacgccgcggtctacctggccctgctgtcggccggcgacaccatcctcggcatgagcctggcccatggcggccacctgacccacggcgccagcgtctcctcctccggcaagctgtacaacgccgtgcagtacggcatcgacgccaatggcctgatcgactacgacgaagtcgagcgcctggccgtggagcacaagccgaagatgatcgtcgccggcttctccgcctattcccaggtcctcgatttcgcccgcttccgcgccatcgccgacaaggtcggcgcctacctgttcgtcgacatggcccacgtcgccggcctggtcgccgctggcgtctacccgaacccggtgccgttcgccgacgtggtcaccaccaccacccacaagaccctgcgcggtccgcgcggtggcctgatcctggcgcgcgccaacgaggagatcgagaagaagctcaactccgcggtattccccggcgcccagggcggtccgctggagcacgtgatcgcggccaaggcggtgtgcttcaaggaagccctgcagccggagttcaagacctaccaacagcaggtcctgaagaacgcccagagcatggcccaggtcttcctcgaccgcggtttcgacgtggtttccggcggcacccagaaccacctgttcctgctctccctgatcaagcaggacatcaccggcaaagacgccgacgccgccctcggccgcgcgttcatcaccgtgaacaagaactcggtcccgaacgacccgcgctcgccgttcgtcacctccggcctgcgcatcggtaccccggccgtgaccacccgcggcttcaaggaagccgagtgccgcgagctggccggctggatctgcgacatcctcgagaacatgggcgacgagtccgtggtcgacggcgtacgcgagaaggtcaaggcgatctgcgccaagttcccggtctacggcaactaagcgacaaggcaagacgaaagagcccggcaaatgccgggctttttcatttcctccgagggaggaggcgccgggtagcgttatcgccggtcctcgacatggatcaccgccaaggcctcggcatcctcgccccgccgggagcgaccgtgcatgccgacgagcagctcgccggcgtcctcctccagttcctcgcgagggacgaaggtaaggatgtccgggtgatgcccggtcaccacccagccgcggccgttgtccagggtgatcacaccgaagtcgcccgccggcgtgccgacctgtaccgctccccactcggccagcaatgcccgcgcctgggccgcgaggtccggctccggctgcgtgaggatcacgcaagtgccctgggcgaacagcacccaggatttgtccgcgccacggatgcagtcccgccaggcgccgatcaatgcgttcctgtccatttccacgctcctttggcgtcgatgcgcctcagcggccttcgacgatgcgttcgaagccctcgcggatactgtcctccggcaggttgtcgccgatgaacacgatcacgctctcgcgcgcctcgtcgtcccgccactcgctatcccagtcgaagccgtagagtcgcagcacgccctggaacaccaggcgacgcggctcgtcggcgatgttcagcacgcccttgtagcgcagcagggaattgccatgccactgcaacaggtcgtccatgaactcgctcagcctttcgagatcgagcggcgtgtcgctgcgcagtaccagggtgccgatgcgatcgcggctgtccttggctgccaccgctcgcagcgggcgcaggccgatgccaggaccgaggtcggcgttgaggttgaagccacgtacgtcgagcaggtgcgccaggtcgatgcggccgtgctcgaccacatgcaccagcgccctccggttgatccgttgcaggcgctggcccagggcctcgaaggtggcggcgtcgaccaggtcggtcttgctcaccaggatgcggtcggcgaagccgacctgggcctgggcgatggtttcctgcaggtgacgctcggcgttggcggcgtccaccagggtgatgatgccgtccagcacgtagcgctggcagagttcctcgtcggcgaagaaggtctgcgccaccggcgccggatcggccaggccggtgcactcgatcaccaggcggtcgaagtcgatttcgccgttgtcgcggcgctccagcaggaggaacagggccttttccaggtcggtgttgatcgagcagcagacgcagccgttggacagcgtcatcacctgcaccggctcgacgccgagcaactggccgtcgatcggcgtctcactgtactcgttctcgatcaccgcgatcttcatgccgtgctcggcctgcagcaggtacttgagcagggtggtcttgccggcgccgaggaagccggtgagcacggtgacggggatcggggcgtggttgtcgttggctacttcggacatgcgcaacttccagaaaagacgcgggccacgtcagacgtggcccgcggaaggatggggattcagcagcagcggatcggccgacccttgccgccaccgtagcgcgcctcctggcgctcgcggaagaactcctcgtaggtcatcaccggcttgtccgggtgcttgttgcgcatgtgctcgacataggtgtcgtagtcgggcatgccgaccagcatccgggcggcctggcccaggtatttgcccatgcggctgaggtcgttgaacatggcgagttcctcgttaaggctccccggcgaaccggggagcgcggccggtcaggcgtcggggatgggctcgaacggggtttccttgtcggtccgctcgctcttgccccaggccgcgatgccgaccttgatggcgtagaacagtacgctgaacaccaccagcaggaacagcacggtcagaccggcgttgatgtaggcgttcagcaccacgtgctgcatctggccgatatccttggccggcgccagcacctggccggcatccagcgcggtggcgtacttctcgccaagagcgacgaagccgaccgccgggttgctgtcgaagatcttgatcaggcccgcggtggtggtgcagatcagcaaccaggccgccggcaggatggtgacccagacatactgctggcgcttcatcttgatcaggaccacggtggcgagcatcagcgcgatgccggcgagcatctggttggaaatgccgaacagcggccacagggtattgatcccgcccagcgggtcgaccacgccctggtacagcagccagccccacagcgccacgcagccgccggtgccgatgatgttggcggtccacgactcggtcttcttcagcgccggcacgaagttgcccagcaggtcctgcagcatgaagcgcccggcacgggtgccggcgtccaccgcggtgaggatgaacaaggcctcgaagaggatcgcgaagtggtaccagaaggccatggtgttctcgcccggcagcacctggtggaggatgtgcgcgatccccaccgccagggtcggcgcgccgccggcacgggccaggatggtggtctcgccgatgtcctgggcggtctgggtgagttgctccggcgtgatggcgaagccccagctgctgacggtcgcggccaccgcgttgacgtcggcgccgaccaccgccggcgggctgttcatggcgaagtagatgcccggctcgatcaccgaggcggcgaccatcgccatgatcgccacgaaggactccatcagcatgccgccgtagccgatgtagcgggcgtcgggctcgcggttgagcagcttcggcgtggtccccgaggagatcagcgcgtggaagccggacaccgcgccgcaggcgatggtgatgaacaggaacgggaacaggctgcctttccagaccgggccggtgccgtcggtgaactgggtcagggccggcatcttcagttccggcatgacgatcaggatgccgatcgccaggccgatgatggtgccgatcttgaggaaggtcgacaggtagtcgcgcggcgccagcagcagccacaccggcagtaccgaggcgacggcgccgtagccgatcagcatccaggtgatctggattccactgaaggtgaaatgcggcgcccattccggactggccgcgacctgcccgccgagccagatcgaaccgagcaggaggaacaccccgatgatcgagatctcgccgatccggccggggcggatgaagcgcatgtagacgcccatgaacagcgcgatgggaatggtcgcgaggacggtgaacatgccccaggggctgtcggccagagccttcaccacgatcagcgcgagcaccgcgaggatgatgatcatgatcaggaaggcgccgaacagcgcgatggtcccggccacctggcccatttcctcgcgcaccagctcgcccagcgagcggccgttgcgacggctggagatgaacaggaccatgaagtcctgcaccgcgccggcgaggactacgccggcgatcagccagagggtgccgggcaggtagcccatctgcgcggcaaggaccggaccgaccagcggaccggcgccggcgatggcggcgaagtggtggccgaagaggatgtgcttgttggtcgggacgtagtccaggccatcgttgttgagtaccgcgggagtggcgcggttggggtccagttgcatcaccttgctggcgatgaacaggctgtagtaacggtaggcgaccaggtagatggccaccgccgccaccacgatccacaaggcgttgatcgcttcgccacgacgcagggcgacgacgcccagggccgcggcgcccacgatcgccaccaccagccaggcgaggtgacgtagcaggctattgttattgttcatagtgtttggcttccgacagatggagggcgcagttctgcagcgaaaattctagccgcgaaccgaccaggggtcatacgaccttagtctagagcggttaccgcgcgatggcggtaggcgcaatgtcgcaggaatccgccggaaaagtccatggccgacaagggccggccaggcgaaaacgcttcggcgcgaccttgccctctccgtaggaagcgccctgggaaaacgccgcatgcccaagccgttcgtctgccgtggcaacgaaggcggcaacctccggcgggcaggccgcgcacacgaaaaagcccgccgtagcgggctctttcctgggcctgaggtctcaggccggttgcttggcgtagcgcgccagggtgccgtcgcgactcatcaccgccagggtgttgctcaggacctgttcgcccgtcgcatccttgctcgcgaagatctcgccgaaatgctgctgggtgacctgggcgaagtgcgcccggtccttggcttccacgccgagcagcacggcataggcgtcgagcgcttcgccctggcccttggccatgtcctcggcgatgttgtcgagcatcccgttcatggcgaagatcgagcggccgccgtagcccaggcgtgcattggtgttgcaaccgttggtcccggaggtcatgccgaaggtggcgttgcccgaggtaccgttggtggtggtggccagcaggtgcgggaacaggccgcgctggccctcgaacaccatgttgccccaaccacagccattaccgcctgccgcgtcggcgtgtgccgtcatgctgcccaggctcagcagccccagaaccaaccccttgctcaaaagtcgcttgtccatgtctgcgctccgcagttgtattttggagaaaaacgctttagcagctttggcgagacttgacgaactgtcaaactcggacacatgccgccgatccagccgcacaggcggggacggacggcaccgccgatcgaattccgccacttccccgccggcatggcttggctatagtggtatccagcagcgcgcaccgagggatcgcgacatgagtgaccagcacgacgaacgtcgacgtttccaccggatcgccttcgacgccgacagcgagatcctccagggcgaacggcgctgggaggtcttgctccacgacgtctccctgcacggcatcctggtcggccagccgcaggactggaacggcgacccgcaacggcccttcgaggcccgcctgtacctgggcctggatgtactgatccgcatggagatcagcctggcctgggctcgcgacggcctgctcggcttcgaatgccagcacatcgacctcgactccatcagccacctgcgccgcctggtggaactgaacctgggcgacgaggaactcctcgagcgcgagctggccctgctggtcagcgcccacgacgactgaggcgggtcactcgaagagggcgtccagggcctgctcgaggcgcgtcacggcgatcacctgcaatcccgccggcgcctccttcggcgcgttgccgaggggtacgatggcacgcttgaaaccatgcttgccggcttccttcaggcgctcctggccgctcggcaccggacgcacctcgccggacagcccgacctcgccgaacaccagcaggtcgtgcggcagcgggcggttgcgcaggctggacatcaccgccgccatcaacgccaggtcggaggcggtttccagcaccttgaccccacccaccacgttgaggaacacgtcctggtcgtaggtcgggataccgccgtgccggtgcagcaccgccagcagcatcgccaggcggttctggtcgaggcccagggtcacccgccgcggattcgccaggtgactggtgtcgaccagcgcctggacctccaccagcatcggccgcgagccttcccatgtggccatcaccacgctgccgggcaccgcttcctgggcccgcgtgaggaagatcgccgaagggttgctcacttccttcaggcctttgtcggtcatgccgaacactcccagttcgttgaccgcgccgaagcggttcttcaccgcccgcagcaggcgcaggcggccgtctgattcgccctcgaaatacagtacggtgtcgaccatgtgttcgagcacccgcgggccggccagggcgccttccttggtcacgtggccgaccaggaagatcgccgtgccgctctgcttggcatagcgcaccagcatcgcggcgctctcgcggacctgggcgacgccacccggcgccgattgcaactgctcggtgaagatggtctggatcgagtcgatcaccatcacccgcggctgctcctggcgcgcggtggcgatgatggtttcgatgctggtctcggtcatcaccttgagcttgtcttccggcaacgacaggcgccgcgcgcgcatcgccacctgctgctgggattcctcgccggtgacgtacagcgccgggacgcggctggccaggttacaaagggtctgcaggagaatggtcgacttgccgatgccgggatcgccgccgatcagcaccaccgaaccgtccaccaggccgccgccgagaacccggtccagttcggtggagccggtcgtgaagcgcggcatttcctcgacgctgacctccgccagggtcttcaggttggcctgctggccggcccagccgccgcggccggagccgctcggcgcggcctcgacgacggtctccaccagggtgttccaggccccgcagtccgcgcactggccggcccatttcgggaaggtcgcgccacactcggtgcagccgtacatgcgcttggccttggccatgggaactcctctcgcgggcaaagcgcagatgatagccgctggcttgattccgatcagcctcgatcgaccgcgcttcgcgcgacactgacggccggacaaggagacttccatgcgcacactgctgttcctgcacctgctgggtgccgcgatctgggtcggcgggcacctggtcctggccctcggcatcctccccggcgccctgcgccgccgcgatccccaggcgatccgcgccttcgagcaggtctacgagcggatcggcatccccgccctgctgctgcaggtggtcagcggcctgtggctggccagcctgtggctgccgttcgaccactggttcggcgccacgccggtggcccgtgccctgcagctcaagctgctgctcctggcggcgaccgccgccctgggcgtacatgcgcgcctgcgcctgatcccgaacctggacgccgagagcctgccgaagctgggctggcacatcgccgcgatcaccctggtgggcctgggtttcgtcgcggtcggacagagtttccgtttcggcggcgccttctgagcatgcccacatgaaaaagggcgccggaggcgccctttttcatgccgttgtcgtgaatgaatcaatggccttttccgttggccttcctcagcctctcggcgatttcgtccttgagttgcacccgttgctgcttcaacccctgcagcgccaggtcgtcgaggggttcgcgaccgccctcgacctcatagatgcgcttgtcgaggctctcatagtccgccgccaggcgagtgaagtgggcgtcgttgccatgaagttgcttcagttcggcatgaaaatccggaaactcccgggaaagcggatgttgctcgagcggcatgacggacctcctctgacgttgtatacgacacctccagactagcccagcaggcctcctccgaacattgcccccgatcacctcgccgccgcagtgccgttcagttcgccgcgtcgcaggctttccacgctgttgcccagcgcatcgcgggcgccaaggtcggcaccgcgcgccgacagcgcctggagcagctcctcgcgctcgaacagcgccgcgtacatggccgcggtctgccctgcgccgttgcgctggtcggggccgcattgcgcgccgatcaggcgccgggcgatgcggacctcgcccttgaagatggcgcccatcagggcggtgttgccgcgcgcatcctggacgcaggggtcggcaccggcctccagcaattgttccaccgctccgccatggccgtggtaggcggccaggatcagcccggtatagcccttggcatcctgcacatcgaggtcgaagccggcctcgacgaactccttcagcatggcctggtcaccgcgtcgggcggcatcgaagaagtagtcgcgcaaccgcgcttcgacctcgaccccatgcacctcgccagcttgcgcggccagcgccgcgagcagcaagcctgccagaatccaacctcgcatcgtcgtcatctcccaccaaaccgatagaggaagggcggcctggatggccgccccggttgcgatcaatcctggagcttcgccgccagttgccggacgcgctgcagatcggccccggccaccttggccaggcccgtgccgtagtcgctgtcagccttgtagaagtaggaaagcatgatgtacttgctctcgtcgtcggtgatcgccaacgccccgccgagactggcgatcaggtcggcctggtccttcttgccgtaggagcggaacagctcgccggtctgcttgaagttctgctcgcgctggatcttcgcctgctgggtggtgccgctcagcggggtccgcacgtagcgggcgctggcctgctcctcgcgcggatcgagccggctcggctggtagttcaccccgctggtactgtgtccggcgttcagcgcgccgtcctggttgacggtattgacctcgctgcgcgggcggttgaccggcaggcccaggccgttggcgccgacccggtacatctgggtatcggcgtaggcgaacagccgtccctggagcaggcgatcctcggagggctcgatgcccggcaccaggttcgacggcgccatggcgacctgttcggtttcctggaagaagttgtcgacgttgcggttcagcaccatctggccgatcttgcgctcgggaatgcccggccagatcttggtcgcgtccagcgggtcgaagtcgaatttcgccaggtcctcgggcttgagcacctggatgtacaggtcccatttcgggaagtcgcccttccggatcgcgctcaccaggtcattggtcatgtggctgtagtcgcgcccctggacttccgccacctgtttcggatcgaggttcttctggccctgcaggctcttccagtggaacttcacgtagtgcacttcgcccctggcgttgaccagcttgtaggcatgcacgctgttgccgtccatttcccggtagctggccggggtgccctcgttggaatacagcagggtcagggtgcgggtcgcctccggcacgtgggagaagaaatcgaagcgtcgcgagtcgtcgtcgaggttgctgcgcgggtccggcttgaaggcatggaccatgtccgggaacttgatcgcatcgcggatgaagaaggtcgggaagttgttgcccaccaggtcccaattgccgtctgcggtatagaacttggtggcgaaaccgcgcggatcgcgcagggtttccggggagtggttgccgtgcaccaccgcggagaagcgcacgaataccggggtcttctcgcccttgcggaagaccttggccatgctcaggtcgctgatatcggcactggcgacgaactcgccatgggcgccggtgccgcgggcatgcaccacgcgttcgggaatacgctcgcggtcgaaacgttgcagcttctgcagcagttgcacgtcctgcagcagcaccgaaccgttgggcccggcggtctgcgagttctggttgtcgcccactggcgcaccgttgtcacgggtcagggtcgcggcctgcacggacagcgacaggaggctggcggtcaggcttgccgccaccagcaggcggccgggacggaaggcgttcagggaagggttcatggaagagctcctaatggcttgtcaggcgtcttgttgcgcccgaccaaggtaaggagcgccgccggcgacgctaaattgaaaaacctcaccgcgccgattaggaatatcaatgcgcccatgaatcgcaaaaagaaataaaaaagaccgccagccgaagaaagcccgcgctggtgcaccaggcactcccagttcgctcgccggtaaacgagttcaccttcgttatttgcctgcgaagttaggtcggagaacctcgccactccaacttcaacttccggcatctgcatggcgcagttccaagttgccgaagttgctttgtcttctttcttggcgaattcctgaaaatcgacatgagtgtaatgtttttcctctaaacttcgtttctccccacaagacccgacgcaaacgtatgccttgcgaattttcgcgttgccggggggaaccaaaacaccaatcttccagcctgagcaacttgccgaaggctgcattagactgcctttacctattagcgaaatacagggagtgaacccatgggtcttctgagtgaattcaaagcctttgccgtcaagggcaatgtcgtggatatggctgtcggtatcatcatcggcgcggccttcggcaagatcgtctcgtccttcgtgggcgatgtgatcatgccgccgatcggactgctgatcggcggagtcgacttctccgacctggcaataacgttgaaggccgccgaaggcgacgtgccggcggtggtgctggcctatggcaagttcattcagaccgtactcgacttcgtcatcgtggccttcgccatcttcatgggggtcaaggcgatcaaccgcctcaagcgcgaagaagccgtcgcgccgtccgaaccgccagtgccgagtgccgaggaaaccctgctgaccgagatccgcgatctgctgaaagcccagcagaacaagtcgtgatcgcgtcggcggaacaatgaaaaagggcccgaacgggccctttttcattgccggacaacacgccgggcggcagcgttatccgccgctactgcgcgggcacgcacctaccagtagttctccaccgccacctgccccgggcgccgcgtcagactgaggttcatgccgcgagccttcagcacggcgcgggtgtcctcgatcatctgcgggttgccgcagagcatcactcgcgaatgctccggggtcaattccaggtcggcgacacgctccagatcgccgttctcgatcagcgtggtgatacgtccgttcaggcaaccgggtacctgctcgcgggtcaccaccggaatgaactgcagcttgtgggcatgctcggccaggtattcgcgctcggcgaggccggcgatcagctcgcggtaggccagctccttgctctcacgcacgctgtagaccagcttgatgctttcgaagcgctcccagacttcgaagtcctgcaggatcgagacgaacggcgccacaccggtaccggtggccagcagccaaaggtcacgaccatccacgaagcggtcgagggtgaggaagccgaaggcctggcgatcgaccagcaactggtcgccctcgcgcaggcggctgagttcgctggtgaactcgccgtccgggacgacgatggaaaagaagtcgaggaattcgtcatgaggcgccgaaaccatcgagtaggcgcgccagacgatactgccgctgggcttgtacacgccgagccgggcgaattgcccggcgcggaaccggaatcccgcgtcgcggctggtacgcagggtgaacaggttgggagtcagaggctgcacgtcgagcagcgtctggcgggtgaatttctcttcgctggcggtcatggtccgctccggataccgatactcccctagtgtcccgcaaagcacccggcagaaacacccgcaaggcttgtggctatccccgctgacgggaatagccagcggccgatcagcgcttgcggttgaccacctgggccgcgcgcaacacgtcactaccgatctgcgcctcgtagttcttccacagcggcttcatggcgttgcgccaggcctcgtgctcttccgcgctgaggctgaccaggcggctcttgccggctgccagcaggtgctcgcgctccttctggttgagcgcttcggcttccttgttcaccaccagggtgacctcgtcgacgatgctctccagttcggtgcgggtctggtagggaatgccggtccagaacgccgaactggtgatcagcatgtagctgagcgcgccgtgattggtctcggtgatgtacggctgcacgctgtcgatcttctgtccggcgaggttcgaccaggtgttctcggtgccctgcacgctgccggcctgcatggccttgagggtctcggcgtaggacaactgcttggcggtggcgccgagcatggcgaactgcgcttccagcaccgacgacggctggatacggaagaccaggcccttggcatcgtccggccggtgcagctcgcgagtggcggaaagctgcttcatgccgttgttccagtaggccaggccatagataccgtgcttggccatggagcgcagcagttcgcggctcttgtcgcgcttctggaaacgcttcagggcctccaggtcatcgaacaggaacggcaggtcgaacacctggagttgcttggtatagggctcgaacttggacagcgaggtggccagcatctgcaccttgttggcgcgcagggcctcgatctcgtcggcgtcgccgaacagcgtcgagttggggtagacctcgaccttgaccttgcccggcagacgctcctcggcaagcttcttgaacaacagcgcccccttgcccttgggcgtgtcgtcggagaccacatgggagaacttgatcacgatcgggccggcgtcctcggcatgggcgacggcggaaacggcgaacagtgcggcgaacgccacaccgacaaacggcttgaacatcgatgtacctgtgcgatggcaacgacgagccccgcgacggctcgcacgggtctcgttcgggaaacgggttgggtgacggtcaccgctcgaagtggcgaaggcgcccgtccaggcgctaccgggtcatgacaggcgctatcgaagccctagcccggttattattggcgtgcccggctggatgactcgtcggtaaggaaacgactaaccagagccgggtaaagaatttttcggcatatccgtgtgccgcacaagctggagaactccaaccagctctcagtttcgacagattgttaattgacgagcgggattcgccccgccgggaacccgatgcctctattcgccacccccttcgcccagctcgacctggtccgccagcccgagcaggacggcgagcccctccaggcgttcgacgccgccgacgaatacctgctcaaccagttgcacgaacggggcgtgacggcgcaatgccgggtgctggtcctcaacgacgccttcggcgccctcgccgcgagcctggcgccgcacgtccaggtcaccagcagcggcgattcgcacctgggcttcctcgccctgcgcaagaacctcgcgcgcaacggcctcgacctgggctcggtgcgcttcgtcccggccagcgaaaccgccgtggggcccttcgatcacgtactggtcaaggtgccgaagaccctcgcgttgctggaggagcaactgatccgcctgcacggccaactggcaccgggcgcgcaggtcgtcgccgcggggatggtcaagcacttgccgcgcgccgccggcgacctgctggaacgctacatcggcccgatgcacgcttcgctggcggtgaagaaggcccgcctgctgatcgccgaggcagcggagcgcccgcaaccgcgctcgccctatccgacccgctatcgcctggagcagccgccgctgacgctgctcaaccacgccaacgtattctgccgggagggtctcgacatcggcacccgcgccttcctcccgcacctgccacgcagcctcggcgcgctacgcgccgccgacctgggctgcggcaacggggtgctcggcatcgcctacgcgctgctcaacccgcaggccgagctgaccctggtggatgagtcgtacatggccgtgcagtcggcgcgggaaaactggcgagcggcgctgggcgagcggccggcgacgttccgcgccgacgatggcctggccggccaggcggcgggctcgctggacctggtcctgtgcaacccgccgttccaccagcagcaggtggtcggcgacttcctcgcctggcgcatgtttctccaggctcgcgatgccctggcggcgggcggcgaactgtggatcgtcggcaaccgccacctgggctaccacgccaagctcaagcggctgttccgcggggtcgagcaggtcgcggcgaatccgaagttcgtgatcctgaaagcgggaaaatagtcagccgagcgccgccggggtgtccacgtcgcggagtacgcccggatcgtcgcacggcacctcgcaccaggccggacgatgggcctgcagcacacggcgcgcgccctggtcgccgtccagttgcgcaagcgcgtcccagaaagcgcggccgaacagcaccggatggccgcgctgaccgtcgtacaggggaaacacgatggcttcgggagtggccatcgcggccagacgctcgagggtatcggcggcgatccagggcatgtcgccgagcaggacggcgatggcccgggccgtgctgttcctcgccgccgcgacgccggcggccaggctgtggcccatgcccaacgatgcatcgaggctgtggacaagccgctgctgcgccggcaggcccaggctcgccggggtgtctccggcacgcaccaccacccgcacctcggcgaacgcctcgcgcgcccgcgccacgctggccgccagcagggtcgtgccatcagccaggcgcgccaggcgcttgtcgctgccgaagcggcgcccctgcccggccgccaggaccaggcacagcacctcgtcggcggcgaccatcagagccgctcgcggggaatgccgttgcggatgcgaagaatgtccgccagcaccgccagggcgatttccgccggcgtcttgctgccgaggttgaggccgatcggcgcgtggatccgcgccagttcggcatcgcccaggccgccgatgcgccgcaggcgctcgaagcgtttctccgaggtcgcccgcgatcccatcacgccgatatagaaggcttcggtacgcaccgcctcgagcatcgccaggtcgtcgatcttcggatcgtgggtcaacgccaccaccgccgtatcggcgtggcaaccgccgtcggcgatgaacagcgagggcagctcgcgacggatctcgatgccctccagcaccacgccgcgcaaggcttcttcgcgcgggtcgcagaggatcacctcgaagcccaggcccttgccgaactcggcgcaggcatgggcgacgctggaatagccggccagcagcaggcgctgggcagcgccgacgcgcaagcgcacgcactcgccgtcgcgttcagcccgagagccgtggctggaatcgtcgcgcaggctgcgcgcgccgctgcccagctcgacctcgcgcagcaggcggcgctgaccaagcaacgccgactccagctcgcgcagatgggcctggacatcgcagtccggcgccaggttttccaccagtacgtcgaggatgccgccgcagggcaggcggatgttcgagttcgggtcgtcgccctcgccgtagcgcacgatcaccgcgggatcggggaaaccgccggcggcgacccgctcgaggaaatcatcctcgacgcagccgccggacagcgagccgatccattcaccgctggcgttcaccgccagcagcgatcccggcgcgcggggcgccgagccgtaggtcgtgagcacggtacagaaccacacccgttcgccgcccacggaccacttcagcgccttgcggaccacctgtagatcgaggtgttgcacgattcacttcaccttgacggtatgcgccgaagcgctctccatcttcaattgcgcgacctgttggggaccgaggtcaccgggcaatccgccccaggtctggcgcaggtagttgagcaggtccgtgagttgctcgtcgtcgagtttcccggcgaaaccgggcatcggttgcatgcgttcgaagccggtgaactgctgttcgacgatgccgtcttcgatcactcgcaacagattacgcgggtcttgcaggcgcagggtagtgttgccgttcatcgccaccgcgatatgcggcttgccctcgccttcgccgccgtggcagccggcgcagacgttgaggtactgctggcgaccgcgcttgccgctgtcgttcagctgcgcctcgggcagcgcctggaccaccttggccggcggcggctggtcgccgagcaggtaggtggccatggctgccaggtcgctgtcgtcgaggtgctgggtgctgtggtgcaccaccgggaacatctcgttgaacatgctgccctgggcgctcatgccgtgcttgaggaagctcgccaggtccggctgggtccaaccgcgcgcggcaaggtcgccgggcagcaggctgggcgccaggtagccgttgagcaggccgccgctcaggcgcttgtcctgctccagggcgccggccaggttgcgcggggtatggcactcgccgcagtggccgagcacctcgaccatgtactgcccgcgcttccaggcctcgctgcgcccttcctccggctgcaagcgcacgctcttgccgtagagcaggttccagccggccaggcccatgcgcacgttgaacgggaagctcaggctggtctgcggcgccggccgggcgatcggctcctgggccatcaggtaggcgtagatggcgtcggcatcctcgcgctcgatcaggtgataggaggtgtagggcatcgccggatagaggtaggcgccgtccttgcgcttgccctcggtaagagcggcgaagaactcgtcggcgctgtaggcgccgatgccgtgttccttgtccggggtgatgttggtgccgtagatggtgccgaacggcgactggatcggcagcccgccggcgaacggcgcgccgccctcggcagtatggcaggccatgcagtcggcggcgcgggcgaggtattcgccgcgcttgaccagcgccgcgtcggcgctggcggcggaggccaggaacggcgacagcgcggccagcgccagggcgaggccggaaagggtgcgcttcatcctcaagcctccttgaccaggccgagttcgtcgagcacgtcgcgggtggcgctgtagtagcgcacgtagccggtgcaccggcagatgtgatggccgaggctgtcctcgatcgcctgctccagctcgctgcgcttgatcggctggcgctgggctttttccaccagcacggtggcggcgttgacgaagcccggcgcgcaatagctgcactggaaggcgaactggtcgacgaacttctgctggatcgggttcagctcgcggatgtcgccattctcgtcgcgctgggcatggccctcgatggtgcgaaccttcttgccgtcgaagtagtgcgcgccggtgatgcaggtgcgcacttcctcgctggtgccgtccggattgtcgacgatcaccacgcaggcatggcagatgccctggccacagcccaggcgcgagccggtgaggttctggtattcgtgcaggtagtcgatcatcggcaggtcttcggcgacctccaccggaccgacggcttgaccgttgagggtcatctggagcttgcggttagccatggagggcctccttgatgcgggcgggagtgatgggcaggtcgcggacgcgcttgccggtggcgtgcgccacggcgttggcgatggcgccgaccaccgggatcatcaccacctcggcgatgcccttggccgggtcggtcggcgacagcggcgggaggatctccgccgtctggctccacaccgccacgtccttcgcccgcggcaaccggtagcggttgaagttccagtccccttccgcggggccgccctcgtagagcggcatttcctccagcagcgcatggccgatacccatggcgatgccgccctccagctggcccttgaccagctccggcaccagcacccggccgcactcgatccaggaatggtggtcgagcacctgcacctcgccgctgcccttgttcaccttcagctcgaccagggtcgccaccggactgtagtaggtgaccatcgcgttgttcagctgggtcgccggataagccggattctgccggtcgagcaggtggaagccggcgctgttcatcatcgccttcttcactcccggcgcgccgtcgccgtacttcaccgccatggcgtcgagcggcaggcgctcgcgcacgccatcgatgacgaagtccgcctcggcccagctccagcggttgaagccgtggacgctgacgccggtgaccaggcccatctcgtgggccttcttcgccagctcggtgaagggaatcggcgccaggccgttgccggtcaactggccgtcgacccataccgcgttttcgcggcgcaccacatagggattggcctggccgccgaacggaccgctgcgccacagctccagggccgccggccacaggccgtggttgaacagcacgcgcgcggcttcgcgggtggcgtggctgaaatagaacgccgagttggtcgccgacgacggcgaggccagcttgccgacccagcgcggatcgcgtagcgcggcgtcctgctcggcctggctcatcaggtagggattgcccttggtggtgagccgcagctcgggccattcggtctcggcggtcttcacctcgtccgccggacggccgaggaagtcgccgaccacgaaggcctgcgaggtggacatcccggtaccgatctcggtgccgatgtggcgcaggctgatgcgcccgtcggcgctgaactcgatgctcgccatcggcgcctcggcgccggtgccgaagtccttctggcaaatggcgaagccgaccccataccagttgtccgggtcttccgcgtcgaagcgcttcttgcgtgcgtcgcggtccttccagacctcgtgggcagcggccttgtcgaggatctcgtgcaggcgcagggcaccggccgggaccgcgccctgggtgttcttcatgcccgagcgcagggcgttgcgacgacgcaggtcgatggcgtcgacgcccagccggccagcgatctcgtcgaccatcatctcggtcgcggccatggtctgcagggtaccgtagccgcgcatcgagccggcctccacgccgcgcgaatgataggcggtgaccgccaggtcgttctgcggcatgtagtagatcgactgcgcggcggtggcgcccaccgccgccaccgaggcgctgtagttggcgcgcccgccgccgtcggcgctcatgtcggcgcggaagatgcggaagccgaggtcgttcctgtctaccgccagttggtagcggatgtcgaacgggtggcgcttgatgccgctctggaactgctcgtagcggtcgttggccaggcgcaccggcacaccctcgccatacagcgcggcgagcgcggcatagaagacgaagatgttgttgtccttggagccgtagccgacggtatagcccggatggatgttgagcttctccagggcgaagcgcgacggcttgatcatgtgcacgctttcgtaggcgacttcgaacgggcactgggtggcgaccacgaagtgcaaggtcttgctcgccgcgtcgtaccagccgttgccgttgtccggctccaatgccgccggctcgatcgatggggtcttgtagcgctcgtcgaagaccagccagtcctgcggcgggttttccagttgctcggccatgcgcttggcatggaacagcccctgctcggtgaggtcgccgtgcagcttcggctcgcgggtccataccggtttgcggttgaggatggtggggaacagcatcgagtccttcaggctggagaactcgtcgtcctcgtagggcgtcttgccgccgacccggacgaagcgatagctgccgtagggatcgccctggtacagcggggcctgggcgccatagcggatcgccttgtcgttgaacttgagcttgagcttggcccggcggaagcgctcgaagtcgttccagatcaggatcgccaccggatggccgatgaacatcggcaccttgcccggcggcaggagcggatcgggcgaatgcgcctcggggaagacgatgccgtccttctccaggtcggcggcggtgacgatacggtccggctgcaactcggcgcccagccaggaaaggtcgtggccttcgtagatgcggtcggcgcgaacggtcttcagcaacatggcgtggccttgctgctgcggccagccgggcatgtccctggcgcggatatcgcgggcgaacaccttgttgccgcagaccttggacaaggcgtcgttacggaaacggacctgaccgttgcccgccatccagcgctgggcggaaacggtcacctggttctcgaacaaggcagcgaacgcctggctgccgagcggcgccagggtgacacccacgccggcgatcaacccgccctggagaaaggcgcgccgggatatatcacggttggacatgcaagttcctctgggtggtacggttcccacccatgtcgttattcaggcttgaacagctcgtccggacggacgaggtggagcacgcaggcggaaaaacctgactcaggagttaattttagcgacaagtcgcacccgaggaaaagtcccgtctaccgctggaaggccccatggacactcgactttggtcgcctgccaggccggctccaaccttttcgtgcgcttctctgaatcttcgatttcggcaatggcaacagccaagaggtaaccacatgttactctccgccctcctctcgaaacgcccgaccccagcatgtccagccaacccagctccctgctccgccatcgtcccttcctcgccttctggctggcccgcgtctgcaccgccagcggcttccagatgctcaccgtggccatcggctggcacatctacgaactgaccggcaatgtcctcgacctgggcctggtaggcctggtcgaattcctcccgcgggtactgttcatgctccacaccgggcatgttgccgaccgctacgaccgacgcaggatcgccgccctctgccaggccggccaggccctggtggcggtggcactggtgctcggcgcggcttcgggagagatcacccgcaacatgatcttcgtcctcgccttcgccctcggtaccgcccgcgccttcgaaatgccgaccacccaggcgctgctgccgaacctggtaccggccgggctgttcccgcgcgcggtggccgcttcggcttcggcgatgcaggcggcgaccattgccgccccggccctcggcggcctgctctatgcgttcggtgcctcctgggtctacgtgccgaccgcgactctctacgtcctcgcgtgcgtcctgacgctcagcctgccggtacgcaaccagccgctcacccagggcaaggccaccctcgactcgctgctcgccggcatccgtttcatccgcagccgaccggacatcttcggggcgatctccctcgatctgttcgccgtgctcctcggcggcgccaccgccctgctcccggtgttcgccaaggacatcctgctcaccgggccctggggcctcggcctgctgcgctcggctccagcggtgggcgccctggcaatgtcgttctggctggcgcacttcagcatcgaacgcaacgtcgggcggatcatgttcctctccgtgggcatcttcggcctggcaaccatcgccttcggcctgtcgaaatcgttctggctgtccctcggcgtgctggtggtactcggcgccgcggacatggtcagcatggtcatccgcggcgccttcgtgcagctcgagacccccgacgagatgcgcggccgggtcagcgcggtgaacggcctgttcatcggcgcctcgaaccagctcggcgagttcgagtccgggctcaccgcacactggttcggcacggtaccggcagtggtcctcggcgggatcggcaccctggtggtcaccggagcatggatgaagctgttccctagcctggcgcaacgcgaccgcctgcactgaggccaatgccgtcgcgcgtcgctgccccgacagcggcgtatcggcgataacgcctggggcgttatccgtcctccccatggaacaccgcaccttctcggcaataagaaagcccggcatcgagccgggcttttctcgcaccttgcggcgtgatccgcggtgtcaggcggggcgccgcatctcccgatgcaggcggtcgacggtgcgctcgctaccgttgtcggccaggcgcagatcgacgcgccccatgtccttgtgcagacggtcgacggtctgttcgctgccgttctcggccaggcgcgcctcgcggctggtcatgtcgcggtgcaagcgatcgatggtctgctcgctgccgctttcggcgacccggcgttcttcctggacgcgcggcgcctgggtcttgcgcaggcgttcgagggtacggtcggaaccgtcggaggcgatcagttgttgggcaccgcgcagggcgatggattcgacccgcggtgcagcgaaggcggcattggcggtcagggtagcaagggcgatggcgaggatcagcgggcgtttcatggcagtggctccaggtattcgttacgtggggccattctctgttcgagaaactcgattggaaaacgaagcgcgccaatagtattcatcgacgtttgaaatagtgcgaataaccgctctagcacagcagttacagcaagaatacgcctctccgaccggcctcaacacggattgacggcatcgatatgaaaaatcgaagaaatcgaaagtttgagaaaaacactcggaattgagcacagacctccctctccgcagaaccggagaggggctccgtcagcagcctccggaacggaggccggcagggttcagaagcgcgccaccacgttgaacaggacccgcgtctcgcgcttcccatcgcgctggtcggctggctcgccgatgacctggcgggcaatctccgggttgaacgacaactggtcggtgaggttgaagcgcaccccggcaccgatcgagccgagcttctgctgctcgtcatcgtccacgtcgaggttgtaggtcttgccccagtcgtagaaagcgtaggcctggtagctgcgcagccagctatagcccaccgcctggccatagcgcggttcgagcttcagggcgaagccacggtcaccggtgatgttgcccggggcgaagccgcgaccgatcccgctgccgccaacgccgaagcgctcgctcggcagcaacgggtcgaagctgtactgccattgcaactcgccatacaccgaccagggtccgccgagcccttgcagacgcccgatgttgccgttgagatagacgaaacgtccgtcggccacttcgcgggaacgacgttcatcgtccttcttggtcgcgccccacatgtccaggccgatgttgttgcgcacctccgccaggttgatgcccatccagcggtcgacccagtcataggtcaggcgttgctggaacacccgcacatggtcacgaccggggttcgaggcgtcgctggcgaagtcgcgcaggcgggtctcggtatccttccactgcaacgccaggccgccgctcaggttctgcgagcgcgagcggatgaagggatggttgtaggaaatgctgccttcggtgctcttgctgacgctgtcgaaggggaataccgagtccgggatgtccgggttgaccttcgaataggaacccatgatctgcagggtatcgccggcgaacatgccgcccagcggcaacgtgccgcgcaactggatgtagcgggtggcatcgctgaacggcgagatcgcaccgagcacgtcgatctgctcgtagaagcccaggcgggagaactcggtggcgccgaaggccagggtggtcgggtcggtgtagtgcgaaccgcggttgtcgaggctgacgaagccttcgtatcgctgctgctgcaaggccacgtcgaggttcgacgagcccagcgcctgacccgggctgagcacgctctgcacgttgacccccggcaggtcgccgaccagcagcaggccgcgctccagggtatcggcatccagcggacgtttttcggtcagcggtgcgagcagttcctccacccgcacccgcggcccatcgacggttcccttgatctgcacgtgttcgaggtaaccctcgatcacctgcaggcgtaccttgccgccctcgatgctctgctccggcaccactacctgggtcaacaggtagccgtcctggcggtacttggcggtgaggcggttggccaggtcgaccagttcggccagggacacctgcttgccgagcatatgctggtaataggactcgagcaccgccttgtcatagcgggtgttgccttcgatgcgtatctcgcgcagttcgaagcggatctgttcgctgccttgcggcgcgacctgcttgggcaccaccagcggcgcctcgggcttggcctgcggctcgctgcggggcttgaagcgttcatcgagctgggatggctgtacagtccctggcaactccacggcggcggcggaagctgccagcatcccgcagccacagagcgtcacccagcgaagcgtccattgcgaaggtttcatcattcacctcgggcagatgacgcactaccgcccggagacgatagtgcgcattgcgaaaagggttagaaattcagaggcttgttgaagcagctccagtagtcggccaggtagctctggttcgagcaacccgccccactctcggcctctgccctgagcggacgatcggtgaactgccccacccgcttggcgctggcgtcctccgccggacccgcggcggtagccggcagcaggttaggatcgctgacgtccatgcccagagcgtaggcgcgcaggaacgggttttcgaggaacgggttttccagcgtggtggtgcggtagaccgcatccccgggggtatccggatcgcgccccttctgcagttcgcgcaagtcggagagcgctgccagttgccccaggtcgcccggcgtgaccggcagcggcaggatgctcagcaggttgccctggtagttgagctggtagttgccgctggtgagggcaagcccaccctggaggatgtcgtactggcctacggcttcgccgcccacccgaccgagcccgccggcgagcacctgaccggcgctatcgccattcttcaggccggaaacctgataggtcagcgccgggtcggcggtgccgacctgcttgctcttggcatcggcgaatacgttgagcagcgccttggtgatggtcaggtcattaccctggtaggccaggtcatagttgccactggtcagcaccaggccgccctggttgatgccatacacacccacgttctcgcctgcgtcgcggttcagcccgccggtcaggatcgagccggcgctgtcaccgttcttcaggccgctgacctggtaggtcaggctcgggtcggcgtcgccatagaccttggtcttgccgtcggcgatcacattgagcagtgccttggtgatggtcaggttgttgccctggtaagccaggtcatagttaccgctgaccagacccaggccaccctgctgaatcgcatagttgcctacgttttcgccggagacacgaaccaggccgccgccattgagcaccgcgccagcggtatcgccgttcttcagcccggaaacctggtaggtcagtgccggatcggcatcgccatagaccttggtcttgccgtcggcgatcacattcagcagcgccttggtaatggtcaggttattgccctggtagctcagatcgtagttgccgctgttcaatgccaggtcgccctgattgatgccatacacacccacgttctcgcctgcggcgcggttcagcccgccggtcaggatcgaaccggcgctgtcaccgttcttcaggccgctgacctggtaggtcaggctcgggtcggcgtcgccatagaccttggtcttggcatcagcgatcacattcagcagcgccttggtgatggtcaggttgttgccctggtagctcagatcgtagttgccgctgttcaatgccaggccgccctggttgatgccgtacacgccgacattctcgccagccacgcggctcaggctgccgccgttgagcacggcaccggcggtatcgccgttcttcagcccggaaacctggtaggtcagtgccggatcggcgtcgccatagaccttggtcttggcatcggcgatcacattgagcagcgccttggtgatggtcaggttattgccctggtagctcaggtcgtagttaccgctgttcaatgccaggtcgccctggttgatgccgtacacgccgacattctcgccagccacgcggctcaggctgccgccgttgagcacggcaccggcggtgtcgccgttcttcaggccgctgacctggtaggtcaggctcgggtcggcgtcgccgtagaccttggtcttggcatcggcgatcacattcagcagcgccttggtgatggtcaggttgttgccttggtagctcaggtcgtagttcgcgctgaccaggcccagtccaccctggttgatgccgtacacgccgacgttctcgccagccacgcggctcaggctgccgccgttgagcacggcaccagcggtgtcgccgttcttcaggccgctgacctggtaagtcaggctcgggtcagcgtcgccatagaccttggtcttggcatcggcgatcacattcagcagcgccttggtgatggtcaggttgttgccttggtagctcaggtcgtagttcgcgctgaccaggctcagtccaccctggttgatgccgtacacgccgacgttctcgccagccacgcggctcaggctgccgccgttgagcacggcaccggcggtatcgccgttcttcagcccggaaacctggtaggtcagtgccggatcggcgtcgccatagaccttggtcttggcatcggcgatcacattcagcagcgccttggtgatggtcaggttgttgccttggtagctcaggtcgtagttcgcgctgaccaggcccagtccaccctggttgatgccgtacacgccgacgttctcgccagccacgcggctcaggctgccgccgttgagcacggcaccggcggtatcgccgttcttcagcccggaaacctggtaggtcagtgccggatcggcgtcgccatagaccttggtcttggcatcggcgatcacattcagcagcgccttggtgatggtcaggttattgccctggtagctcaggtcgtagttaccgctgttcaatgccaggtcgccctggttgatgccgtacacgccgacattctcgccagccacgcggctcaggctgccgccgttgagcacggcaccggcggtatcgccgttcttcagcccggacacctggtaggtcagtgccggatcggcatcgccatagaccttggtcttggcatcggcgatcacattcagcagcgccttggtgatggtcaggttattgccctggtagctcaggtcgtagttcgcgctgaccagacccaggccgccctggttgacgccatacacacccacgttctcgccagccacgcgactcaggctgccgccgttgagcacggcaccggcggtgtcgccgttcttcaggccgctgacctggtaagtcaggctcgggtcggcatcgccgtagaccttggtcttggcgtcggcgatcacattcagcagtgccttggtgatggtcaggttattgccctggtaagccaggtcatagttaccgctgaccagacccaggccaccctgctgaatcgcatagtttcctacgttttcgccggagacacgaaccaggccgccgccattgagcaccgcgccagcggtatcgccattcttcaggccgctgacctggtaggtcaggctcgggtcggcatcgccatagaccttggtcttggcatcggcgatcacattcagcagagccttggtgatggtcaggttattgccctggtagttcagggtgtaattgctgctgaccaggcccagtccaccctggttgatgccatacacgccgacgttctcgccagccacgcggttcaggctgccgccgttgaggacggcaccggcggtatcgccgcgcttgagaccggagacctgataggtcagcgccggatcgaggtcgccgtagaccttggtcttggcatcggcgatcacgttcagttgtgccggggtgatgcgcaggtcgttgcccacgtagctgagggtgtaattggccgtgttgaggcccagctcgccctggagtatcccgtagttgccgacgttctccccggccacccggccgaggttgccgctcagcacgccagcggcggtatcgctgttcttcaggccactgacctggtaggtaagggtcggatcggcgtcgccatagaccttggtcttggcgtcggcgctgacgatcaattgcgccggcgtgacggtcagcttgccgtcctggcgcaccagttggtaacgctggctgaaatactcgctgccattggcgttaccggtgatcgcgtactgcccgacgttcgacgcctgggtcgccgtggtgctggcggtcgcctggtagaggtcgttgaactggctgttgacgtaggcgtcgatggcgttgatgccggacatcgtggccgtcagagtcggattcacatcaccgtagacgcgggtagcgtcattggcggtcagggtggcggtctgctggcgggaaaggatgtcgccggcagtggtggtggtcttgaacatctccacctgggcgcgctcggcgaagctgttgaacgctccctcgcgcatgaacaggtccaggcgggtatcgacgcggctggtcttgccgccgaggccgaagatcagttcctcggtcaggccggtgccgacgtcgtactgcagctcgtcggtcacgccgatcacgccgccgaagcccttgacgccccaactggtgccccagtttccggtccaggtggtgacgctgccgttgccggcggcgacggtgaacccgctgggcgcaccgccgttcggggtggcggtgacgttgctgccgttgacctggtagcgcaggttggtcaccaggtagtccgacgagtcgttggtcgggaaactggcggaaccgctgacccgccgatagggcagcgcggtgaacaccaggcggtcgaactcgctgttgccgtcggcagtcagcgtgtagttgccggtggtgccaacgctgttggcctcgagaatccgcgtgccgacgctggagacgatgttctgcgcggtgccggtcatgctctggttgatgaacggatcgaacaccgtgccgctcgtggtcacgccggtggcgttgctctgccggtacttgagcgtaccgttgaaggtctgcagcgccaggttgccggcgtagttgtcccaggaagccaggtcgatgctaccggcgcggccggcgaggttggcggcgatcaatgcggtaccggcctgctggctgatcttgccggcggtgctggtctgcatccacagggtgccgctgcccaggtcgacgatgccgctggtctgcggcgtgccgccgctgaggaagctgatgttgccgccggcgcggattgccaggctgccgttgcggaacaggatcggcgcagagatatccaccgcaccggcaggtccggtggcgatcagctccaggccgcgactggcgccgcccaggttgctggtgatcagcggcgcttccaccgacagccggtcgctggcgctgagggtcaccttgccgcctgccagcgccccggtaaccaccgaggcattcaccgtcgcgtcgccgctggcgccgttggcgccccccaccgaacctgaggtgccgccggaggcgacgatgcgcagggtggtcgggtcgagcagccaggtgccaccgttgccgtagggtgcggcgacgctgacgtaggcgctgtcggcgatgctcaggttgaccttgccggaggtctccaccaggccgccgttgccgccctgggcgccgccgcgcgcgaggatccgcccgtccatgcgggtattgccgtcggaccagaccaccgccaggccgccattgcccttgccggtagccgagacgtcgatgctggcgcccttggccagcgtagcgttcttcgctcgtggcaactcgccgcggccctggaagtcgccgccgatgcgcacgctgccgccctgtgcggcgccgcgggcgtcgatgctggcggtgctcgccagggccacctgctgcccgctgaccagcacgtcgccgccgctcttcggaccgctgacgtcgatcttgccggcgacctggatgtccccggacttgcttaccagcgccacgctgccctcgcgcacctcggtaccgcgggcgaggatcacgccggacaggttgaccgcgttgtcgaccacccgggaagcctgctcggcggtgatcagcacgctaccgccgtcggcctggatcgcgccgccgttgctgaccagcgcctgggcatcctgcggcttgcgggtaaccgggtcggtcacggcgatggacaccaggccatcgccgtagaggtcgatggtcgcggcgttgccggcggccatcgccacggtgccgagacgggcgttgatcacgccgttgttggccacggacggcgcgacgaaggccgccaggcctttctccgcgacgctgatgctgccgtcgttgacgatccgcgcgtcggggtttccgggctggtcgaagatcagcttgccctggcggaagtgttcgtcgctgatgttcgccgtggtggtgatcagggagcccacgtcgaccttggccgagccgctgaataccacgccgttggagttgtagatgatcacctggccgggcgcggagatgcgcccggcgatcacactttcctggcctgcggtgacccggttcagggtcgacgaggtcacgccgggctggttgaagcgcaccgcctcgtcggcggagacgtcgaagcccttccagttgatgatcgcgcgctgggtgctctggtcgatcagcgtggtcttgccctgctggctgatcttgatctcgttggggttgaactgggcaccggtaggtgccgccatggccgcgttgatgctggcgatggcgaacatgagggtgctgctggcggcaaggacgaaacgcccttccctaccagctttcgaagaggtgcgcttgccgcgctggctatccggacggaccatgaaaatctccctatctgcgtggcgcacgtcagttttccagcactgcatttcgtcagttaaatgacgaaaatctgagaagcaattcacattgcgccttgtgtgccaaaaaaatgcctttcagatcaaaaattgtccacttgaaagggcgaccgttcgtcggagtgactcaaaaatgacactacagaggttaaatatgtaatacagtcaaaaaaccgacaatactttctgaataatcactgtcaagaaaaccggaagacctccctggcacgcgggtttgctaggctaggcagcccccgtccgctgccgccaaggaaccgtccatgagccatgccctgcgcgccgttttcctcgaccatgcctccctcgacctcggcgatctggacatgcgtcccctgcacgccgccttcgacgagctgcaactgcatgccgccagccagccgcaggaagtcgccgcgcggctgcacggtgcgcgggtcgcgatcagcaacaaggcgccgatcgacgcgcaatgcatcgccgcctgcccagagctggaattgatcctggtcagcgctaccggcaccaacaacatcgatctcgctgccgctcgcgagcgcggtatcgtcgtcgccaactgccatggctacggcacgccctcggtagcccagcacaccctcgcgctgctgctggccctggctacgcgcctgccggactaccagcaggcggtacgcggcggtcgctggcagcaatccagccagttctgcctgctggacttccccatcgtcgaactggaaggcaagaccctcggcctgctcggccatggcgaactgggcggggcggtggcgcggctggcggaggcgttcggcatgcgtgtgctgctcggtcagttgccaggacggcctgcccgggcggaccgcctgccgcttggcgaactcctgccacgggtcgacgccctgaccctgcactgcccgctgaccgaggacacccgcgggatgctcggcgccgccgaactggcgctgatgaagcctggcgccttcctggtcaataccgcccgtggcggcttggtcgacgaacaggcgctggccgacgccctgcgcggcggccacctgggcggcgccgctaccgacgtgctcagcgtcgaaccgccgagaaacggcaatccgctgctggcccccgacatcccgcgcctgatcgtcaccccccataacgcctggggcagtcgcgaggcgcggcagcgcatcgtcggccaactggcggaaaacgcagaggcatggaaggccgggcgcgccctgcgggtagtcaacgccggctgatacggcgctgcgggcaccgcgcacggatgaacggcgatcctcgccgacaatccatgcgggtatgccaggcccaagcctgttaagatttcccattttttccggagcccgcatggaccctcgcagtgaagtgctgctgcgccagcgccacctcttcgcgaccccgctgctgctggccggcctgcccgccgacgacctgctcgccgagctaccgcaggcccagggctggagctggcacgccggcgagcaggcgcagttggacgcccgcttccccgaccgtagccgtttcgacacgcgcgcgccgaccggcgcctggacttcggccgttctgttcctgcccaagtcccgcgaactgaccgactacctgctggccagcctggccgcccgcctgcccggcggcgaactcttcctggtcggcgaaaagcgcggcgggatcgagcgcgcgagcaagcagttggccgcctacggcaagccccgcaaactggatagcgcgcggcattgccagctctggcaggtgcgtatcgaacaggcgccggccgagcccgacctgcacgccctggcccagcgctacagcctgccgctggccgatggcgagctgcaggtggtgagcctgccgggggtgttcagccatggccgcctggatcgcggcagcgcgctgctgctggggcaactgcaagccctgcccggcggccatctgctggacttcggctgcggtgccggggtactcggggcggtcctcaagcgtcgctaccccgccagtcgcctgagcctgctcgacgtcgacgccttcgctgtcgagagcagccgactgaccctcgccgccaacggcctggacggcgaagtgatcgccgccgacggcatcgacggcgcgccgcgcgaactcgccgcgatcgtcagcaatccgcccttccaccagggcgtgcacaccgactaccaggcctccgagcgcctgctgcaacgcgccgccgagcacctggcgccgggcggcgaactgcgcctggtcgccaacagcttcctgaagtacccgccgttgatcgaacgccacctcggcccctgccggacactcgccgaaggcgacggtttccgcatctactccgcccgtcgctcctgatttctgcctggaaccctgtgaatgaagcttttcctctccctgcccgcacgcccgcagccagacccttccgtggccacccgccgggaggccgccgatgactgacctgaacgccagccagggccagcaattgcggcgggtgctcaagccgcgccacctgaacatgatcgccatcggcggctccatcggcaccgggctgttcgtcgcctccggggccaccgtggccaccgccgggcccggcggtgcgctgctttcctacgcactgatcgggctgatggtgtacttcctcatgaccagtctcggcgagatggcggcctacatgcccgtttccggctcgttctgcacctatggcagccggttcgtcgaagatggcttcggtttcgccctcggctggaactactggtacaactgggcggtgaccatcgccgcggaactggtggcggcgcaactggtgatgagtttctggttccccgaggtgccgggcatctactggagcgcgatcttcctgggcattatgttcggcctcaacgtgatttccgcgcgcggcttcggcgagagcgaattctggttcgccctgatcaaggtagtcacggtggtgatcttcatcggcgtcggcctggcgaccatcttcggcatcatgcatggcgtggagtcgcccggcttcagcaacttcaccatgggcgacgcgcccttcgtcggcggcttccaggcgatggtcggggtggcgatgatcgccggcttctcgttccagggcaccgaactgatcggcatcgcagccggtgaatcggaaaatccgcggaagaacatcccgatcgccattcgccaggtgttctggcgcatcctgatgttctacatcctggcgatcttcgtgatcggcatgctgattccctacaccgacccgaacctgctgaagaacgatgccagcgacatcagcgtgtcgcccttcaccctgctcttcgagcgcgccggcttcgccgcggcggccggggtgatgaacgcagtgatcctctcggcgatcctctccgccggcaactccggcatgtacgcctcgacccggatgctctacaacctcgccctcgagggcaaggcaccgcgcctgttctcccgcgtctcgcgcagcggcgtgccacgcaacgcgctgtacgccactaccctggtcggcgccctgtgcttcctcacttcggccttcggcgacagcaccgtctacacatggctgctgaacacctcgggcatgtgcggcttcatcgcctggctgggcatcgccatctcccactatcgcttccgcaagggttacctggcccagggcggccgcctggaagacctgccctaccgggccaagctgttccccttcgggccgctgttcgccttcgccctgtgcatggtcatcaccctcgggcagaactaccaggcgctggtgggcgaacgcatcgactggatcggcctcctcgccacctatatcagcctgccgctgttcctggcgatctggctgggataccgctggaagaagcgcgcacgcttcgttcgctaccacgaaatggacgtcagcccgaccaatacctgactcaccctgccgcccagcgattcctcgcggatcgctgcggatgccggcacgtttccttgcgatcaggctccctcgccgccctcccggacgaaagtttccgtcccgggcttgcccaagccgcccggcttgggcagaatgcgccccgtcctaggggagtagtctcccgcgagcgccgcaccggcctcgcccggcacgcgtcaacacacttggtccgcagaccatggcgcgcgcgacccaagcctgcccagacaggccaagggtttgacaagacctatgacacgcacgatctgacccggggcgggcagatggcgcgtgtcatggtgattggtcgacccgccccttaggaagcctgatggaatcgctgttcgtccctaccctcatcgttgccctcgcggaaatcggcgacaagacccagttgctggcactcctgctcgcggcgcgtttccgcaagccgtggccgatcatcgccggcatcgtcgccgccaccctggccaaccatttcgctgccggcgcggtgggcgcctgggtcgccagcttcttctcggaagccaccctcagctggatcctcgccgcctccttcatcgccgtcgccctgtggacgctggtaccggacaagctcgacgacgaagagtccggactgaagaaatacggccccttcctcaccaccctgatcgcgttcttcctcgccgagatgggcgacaagacccaggtcgccacggtcatgctggccgcccagtatccgcatttctggctggtggtgatcggcaccaccctgggcatgctgatcgccaacgtaccggtggtactgatcggcaacctggccgccgacaagctgccgctgaccctgatccgccgcctggccgcggccgccttcgccgcacttggcctgtacgccgcctggcacgccgcgcaattgaccggctggctctgaaggactgcgccgccgggcccgggatggctgggcggccaatgcaaaatgcatgggaacggctacagttcaggcaggcaccggatgcctgccccaccactcgccctcgagagccggagatgccctcacacgacctgaaacgactcgcccgccatcacatcgagctgtcctggaacaagggccgcatggcgttggtggagcagttgcacagcaaggatttcctctacaaaagctcgttcatcggccgtcccctggataccgccggctatatccgcctgctgcaggacatccgcacggcgatgccggacctggaggtcgtggtcgaagactgcatcggcgaggaacgcaaggtgttcacctggagcacgctgatcggcaccatcgtccggccgaccctgggctatccggccagcgacaaggtgctgagcatttccgcgatgggcttctgggtgttcaacccgcagggccagttgcaggagctgtgcaccatgttcgacatggagagctttcgcgcccagctgggactgcagacccgacccttcgcggaaaaaacgctgccctagccaaccgtcctaggcattgaaatagccgttgtcgcggaaccagtcgatggcgcgcagcagggtgtcgtcgagggcggtggtggagaagaagccgagttcctcgcgggccttgcgtccatcgaggaactgcccgccagccatcacctcgatggcggtttcgtcgagcagcggcaactggccgctgacccggtagcgcaagcggcccagggtggccagcgcgcgagccatggccatcgacatcggctgcggcgcaggctggccgagcagctcggcgatgcgccgggtcaggtcggccatttccaggttgtgcccggtgagcaggtagcgctcgccgatacgcccgcgctcaagggccatcagcagtccgcgcccggcttcggcggcatcgatgacgttacgctggccggcgacgtagtgggtcatctcgccattgccgatggcggtgatcacgcgcccggtagtcgggccgatgtccagttcgccgagtaccatgccgggaatcccgatcaccaccggcaggccgttgcgcgcctgctcccgggcctgctcgtcgagcgcccatttgcacagcacgtaggaactcttgccgctcggcaggctgtcgtagaacaacccctcgtggcccggtagtccctggggatggcggggcatggcatatgccgaaccgacatagaggatgcgcggcaccctggcctgcaggcaggcggcatagaacgggttggtctggcccagcgcgctggccacttcctcctgccagcggcgcggccgcgaaggatagtagccggcgctgaagatcaccccgtcgaggccgcgcagggcgcgttccaggccggcgtggtcgagcatctcggcgacccggcactcgggctccagataggcgagacgctggatctgcgaagaaggacggtggatcagcaccagatcgtgaccggcggccctgatggcgcgcgcggcgtgatgtcccagcaggccggtggctccgagtacggcgtatttcacatgagctccagggcgtgagagtggctgttcgtccacgggtcccgcaagcgggtcggccagcagtctaggccgaacaccggcgagataccaaacagcaggttacggaaatacacaacaggcgtttccgatggtaagcctgtcggcgcgccggccgccccccgcgaccgcgcgccctggcctcacttgccgcgcctggcctgctggtacagcggcatcaccttgggaatcgcggcctggagattggccatccgcgaactgtcggaggggtgggtgctggtgaactcgggctggctggcgccgccgctggccctgcccatcttctgccagagggtgatcgccgcttccgggttgtagccggcgcgggcggccagctcgagaccgatcaggtcggcttcgttctcgttggcacgactgttgggcagggtcatcaggtagtcgacgccggtattggccagctgcaggctttcctggccgaggccggccagggcgccgatctggctggccacctgcacgccgtaggccttggacatggcctcgcgcccatgctcgcgcagggcgtgggcgatctcgtggcccatcaccgcggctatctcgtcgtcggtgagcttcagcttgtcgatcagcccggtgtagaaaatgatcttgccgccgggaccgcagttggcgttgagctcgtcgctcttcaccacattgacttcccagttccagccggtggcgtccgggcggaaggcggcggtctgcgggatcagccgctgggcgatcgccttgactcgccgcgcgtcggcgctgctggtatcgagcacgccggcgcttttcgcctcgccgagagtcttctggtacgactgggcgtacatctggtcgacttcctggctggacaacatgctgaacatgtattgcttgcggtcgacgccgacggcgccgccactggtggtgttcactgcctggcaaccggcgagcagcagcgcgccggcgagggtggcgaatcggaagggatgagccatggtcctttgttctcctctgaaggccgagcgcatggtaggccgcgcctcgaacgccggcaacagccgttggcgaggaaatctccgacggccgattaaggatttgccgtcctcctgccgataagctcctcagagacaattccaacaagggtcagaagtcccatcatgaagctcaagtcgatccagttttctgtcgccgccctcgccggcgccagcgttctaagcgtcgtcgtggtgctggtgctgtacgccctgttcgccggcgcgcgaacgcaggagctggtgcagcaacgcacccagggcctgctggagaaggtcatcaacgagcgcctggtggccctggcccgcgcccaggtcagccagatccagcgcgagctggagtatccgctgacggtggtccacggcctggccaacagcacccgcctgctcggcgagccgggcgccgacggcatgccgcagctgaacgccagccgcgacgaaatctccgcgctgctgcgcagcaccgtgcagaacaaccccaagctgctcgacaccttcatggcctgggaacccgatgccttcgataccgatgccgccttcgccgggcaacccggcaagggctacggcccggacggccgctacctgccctggtggtatcgcggcgccgacggcaagccgatcgtggaggccatggccgacagcatcgatagcgaaaagctgctgcccaccggggtgcgcgagaacgagttctatgcctgtccgaaagagaacaagcgtccctgcatcatcgacccggccccttacgaaatgggcggcaagaccgtgatgatgtcgtccttcaacgtgccgatcatggtcggtgaccagttccgcggcgcagtcggtgccgacctctcgctggccttcatccaggacctgctcaagcgcgccgaccagcagctctacgatggcgccggggaaatggcgctgatcgccagcaacggccgcctggtggcctacacccgcgacgacagcaagctcggcgagcccgccggcagcgtcctcgacggcaacgaagtggacaacctgaagaacctcacggtcgaccagccgctctacgacatcgacgccgagcacggccacatcgagctgttcctgcctttcaccatcgccgacagcggcgtgcgctggaccctcatgctgcagattccccaggcggcggtattcggcgaactgcagcaactccagggcgagctgagcgaccagcgccagcaggatatcctcggcatgagcctggccggcctggtggtagcggccctcggcctgctggtggtctggctggtcggctacggcatcgcccggccgctgcgccaattggtcggcatgctcgacgacatcgcccagggcgaaggcgacctcacccgccgcctgagcagcgagcgcgccgacgagctgggctccatcgccaagggcttcaataccttccttggcaaactgcagaacatgatcggccaggtggtgcaatcggtgcagaaggtcagcgactcctcggagcacaccgccgacatcgccatccgcaccaaccagggcgtgcagcagcaactggcggagatcgaactggtggccaccgcggtccacgagatgaccgccaccgcccaggacgtggcgcgcaacgccacccacgccgccgaggcagccaaccacgcggaccaggccgcgcaccagggcaagcagatcgtcgaaagcagctcggcggcgatccaggccctggccagcgagattggccgcgcggtcggagtggtgcagaacctggccaaggacagcgaaaacatcaacgcgatcctggtggcgatccgcggtatcgccgagcagaccaacctgctcgccctcaacgccgccatcgaggccgcccgcgccggcgagcagggtcgcggtttcgcggtggtggccgacgaggtacgcaacctggcgcagaagacccagcaggccaccgaagaaatccagagcatgatccagcagttgcagcagggcacccgcgacgtggtgaaggtcatgcaggacagccaggagcgcaccgacgacagcgtgcgccatgcgcgccaggcggccgaggcgctggaatcgatcacccaggcggtatcggtgatcaacgacatgaacacccagatcgccagcgccgccgaggagcagagcgcggtggccgaggacatcaaccgcaacgtcgccaacatcggccaggtcgccaaccaggtggccggcggcgccgacgaggcctcgcaggccagcgccgagctgacccgcctggccgagcagcagcggcgcctggtgaatcagttcagggtctagcgtcaggccggggtcaggcactccggcccgtcggtttcaggcttgttgacgaagccggccagggccacgctgcgcaggttcggctggggcttggcgagcaggcttatcagcgccggcagcggcgtgtccggagccagccaggtatcctgctcggcctcgtcgagcagcagcggccggcggaactcggcggccgcctgggatacctgggccacgctgagccaggtttgtccatgcaccggataggcctcccagatgccggcgaagaacaacaggcgctcgccggtggagacccagtacggacgcttacgcaccccgcgccattcatagaagccgttggccggcagcaggcagcggcgctgctggaacgcctcgcggaacatcggttgctcggcgagggtttccgcccgcgcgtggctgggcgtacgcgacaggtcggtgagccaggccggggtcagcccccagcgcgccaggtcggcgcggcgcgcaccggcgtcctcgcgaaccatcagcacctggttcgccggagaaatgttccagtgcgcccgccaatccgccggaaagcccggcagggccgccagcgacggattccagcggaacagggcgtaacgaccactcatgcttggcactgcctggtgagggaaagccgcacagtgtaacccgaagcgccacactggccttgccgaacgcaagctgaatgaaacccaatcttaacttgacgcgcctatcctccaggcttaaggtgccgcccgcattctgtaacccacacaggagtcctgcattggacaacagccctagtcgattgcgacaggtccatccggcgagctagtccagcagaaccctctgccactgcctcgccgaacatggcggacagtggcgatccgcatcccgtccgggatgacgcatccccattttcccttcgtgtcccttccctcgcgccaacgcgcagcgggaagccgcggtcctgcgcaatccatcgtcccttatccgcgcggaccgtcggcccgcgccagctccggccgtcggccggcaacgaggtgaaacatggattggaaagtatttctcctgcgtgtcgcggtcgcgctggtcctgggcgccctgatcggcgccgaacgccagctgcgccaacgcctcaccggcctgcgcaccaacgcgctggtcagcactggcgcctgcctgttcgtgctgatgactcagggcgtgcccggcctggccggcgacgcttcacggatcgccgcctatgtagtctccgggatcggcttcctcggcggcggcgtgatcatgcgcgacggcctcaacgtgcgcggcctgaacaccgcagccaccctctggtgcaccgccgccatcggcgtcctgtgcagcatgggcctgctgctggaggccacgctcggcagcctgatggtgctctgcgccaacatcctgttgcgcgacatcgcccaacgcctgaaccgccaggacgtgttgccggccagcgaggccgagcaacgctacgaagtgcagatcgtctgccgcgccgaggacgagatccaggttcgcagcctgatgctgcacagcctcggcagcagcgacctgcgcctgcaatcgctgcacagcgaggatctggacaacccggccaagctggaagtccgcgccgaactgctcggcacccccgaagctccggcgcagctggaacgcctggtcagccgggtcagcctggagaagggcgtcagctcggtgcgctggcaggtcttcgaactggcggccgactgagcggcggccgcctcaacacaacaggctgccggggccgcagggctccggcggctcctcggccaacggggcggcggcgttgtaggcgaggatcagttctcgcgcccgctccgtctgctcgtccaccaccaacaacgccagcagtccgccaggcggcagttcgccgatggcgccgaccaggtggcggccgctgacatgggcggcgatcccttcgctggcgagcattcccaccagcatctcggcctccagcaggtcggccggctcatatacgcgctgcatcagtcatcctcccggcggacgttcagtgaccagtcctgcccatcggtgcgcaggtcgaacaggatcggccggcagcacaccgggcagtcctcgtagtactgctggtcgccggcgctcaggtcgagcagcgcctcggccggttccccgcagtaagggcagctataggcctggctttcgagcatcgctgcaccccctatgagttccgtttataatcgcgcggttcaattttcggccacccccttgggcggccttcgcagcatccatatggaaccagaaagcatgatgggcgagttcgaagccatccgaccctacagtgacgccgaagtccccgcggtattgcaacgcctcctgagcgacgacgccttcctcggcgccctggtccgctaccgcttcccgcgcctggccggtcccctcggttggctgctcaaacctcttatagcccatcgcctggcccgcgaggtcaccggcatccgcagcgtcgccacgctgcaggacaagttcgagccctacgtcgaccacaccatcgagaaggccaccgatggcgtcacctactccggggtcaatcgcctcaagccaggctgcgcctacctgttcatcgccaaccaccgcgatatcgtgatggacccggccttcgtcaactacgccgtgtaccacgccggcctgccgaccccgcgcatcgccatcggcgacaacctgctgcagaaatccttcgtcagcgacctgatgcgcctgaacaagagcttcatcgtgcaccgttcgctgagcggccggcgcgagaagctcgccgcctaccagacgctctccgcctacatcaaccactcgatccgcgaggaccgccagtcggtgtggatcgcccaggccgaagggcgggccaaggacggcgacgaccgtaccgactcggcgatcctcaagatgttccacatgagccgcaaggacgaacccttcgccgaaatggtgcgcgccctgcatttcatcccggtgtcgatcagctacgaatacgacccctgcgacctggccaaggcccgcgagttgcacacccgcgccagcaccggcgagtaccgcaaggcgccgggcgaggacgatgccagcatcgccctgggcatcaccggctacaagggccgcgtgcacatcaacttcggcgccgagctggagggcgagttcagcgacgccaagcagctggccgccgaactggaccggcagatcctcggcaactaccgtctgttcccggtgcactacctggcctacgagatgagcgagaaccgcgacccgggcctcgccgtccccacggccgagagcctgttcggcagcgaagaactggagaaggcgcgcaaggaatggaaccgccgcctggagcaatgcccggccgagcagcgcccctggctggtgctgcaatacgccaacccggtactcaaccaataccggatcaagcagcaatcctgaagacgaaagcccggcgccgccgggcttctccatcgggcaacggcttcgaacccgcaggcgatggacggataaccgcgatacgcttatccgcgtgcggttcggctcgccgaggcaggccctctcagaaccgcgtgctggcccagctgaccagcagcgccaggcccaggcaggcggcgccgaatcggtagaagaacaggttgatccgcagggtcgcctcgtccatcggcaatgccgcctcccccgcctcgccctccgcggcccagcgcgccagggcgcgacgctcgcgtgcgcgggtggccagcagcagccaggcgccggcgacaccgaagaacagcgcaaggccgttcacggcctgcgcgggatgggcgaggaacagcgcccacaaggcttgcaaggacatcgataacctccgcaacaggaccacacgccggggctaccgaataacgccttgggtgagctgatgacaggacggaccgtcggggacggcggggaaggactggtcgaattctatccagaatgcatgagcgacggccagcggcacccgggttgtcgcgacgaagcgcagcggttagcagcaatccgtctaaaaaaggcgcggcctcgccagcgtgaccgactagtctgaaagtgctttgccggtcacagaaccccacccaggcaaacgacaacacaggagagtcgtcatgctggaaaccgcaccccacgaacataactatctgatcgaccacctggacgagatcgaggccgtgatcgtcgatctttccttcaatgtccaggacgaccgctggctggtgtactgcaccgcctgcggccatgaacacctcgacctgcctgagaccgacgaacgcatcagcatcggcgagccggacccgttccaccaggccgcctgagtttcccgagcgcatgaaaaagcccggcatccgccgggctttctcgttaccgccggctcattgctggccgagggtctgagcgatggtcgggtccttgaacacgcgggtcagggcgtcgctgagcacctcgctgaccagcttgctgttggtcgcctggttcggcgccatgccgaagcgctggttcagggaggcgccatagcgaccggtgtagcgccggctgctgttctgcacgtcggcgcggaaggtcgcggtgatgtcggcctgggtgacgtagacgccgtccttcggcgactggtacttcagctcggccagggtcagggtcagttgcggcgcgttgtaggcgttggccgaaggcgtgtagccgagcaggcgcacggccgtctcggcctgggcctggagcttgggcaccacgtcctcgctacggacggtcagggtgctggtatcggcgtagaggccgccgcgagtgcccagggacgggccgggacggccatcgaccaccttgaccaccaccggctggccatggccgacggcggtcaacggtcctttaaggaccggttgcgggtccagttgttgcgggctcagggcgcagccgccgagaaccagggcgcttgcggtcatcaggctgagcaacaggcgatgcagcatgctcatctctccatgggttgggcacgaatggccggcagtataacggcgccgcgaaagcaccgcagcattgccttggacgttcgccacggggcgcggttcctcgcctgtggcaggtggcgcagggcacgcatgcccggcgtttggcagatacggcgcggcggattgtcccagggggctttcgccggcgggcacttcgtgaccgggaatgggaaaaaagtctaaggagcggggtattttttgattttcaccgttataatcgccccccgattataaggacgcctcctgatcgggttccggcccccgcgccatccccccacagagagccgccagtagagcgctgccccatgaggcagacgccctgaaacgcctgtagcgagtttttcggcaaggaatgccgcatgaccccgcacgattctgcgaaggcatgcccgcgacagacgagcccttccggcccatgtctccaaaagagcgtggatcgaaggtatttcactacttcacgagagtgtggcgagcaatgaagagttttgcgtcggtaagtgcgccattagcgcttgaaacagccccccgcagacgcgaccgcagcggatacctcatgaccagagcctgacggcccgttccgtcgcgaatgtgcttgcacgaccggatgcccgcatgggccagccaggctgccagatcgccagccccgcgcccggcatccataggcgatgacgcccggcgtcccgccgttgttgcgaagaatcggacatgacggctccctccgccgctgcctgccggcccgtaccggcctcggccccgccccgtctgtcgtcaatttggtgctgaagattttggagaagcgttaatggcgcaaaacgatcacgaaacagtcgacatgctgctggtaggcgccggcatcatgagcgcgaccctggcggtcctgctcaaggaactcgaccccaacctgaagatggaagtcgtcgaactccaggagtccggcgcgatcgaaagctccaacccgtggaacaacgcgggcaccggccacgccggcctgtgcgagctgaactacaccccgcagtcggccgacggcagcatcgacatcaagaaagccgtgggcatcaacaccatgttcgaggtgtcgaagcagttctggtcgcacctggtcgccaagggcaccttcggctcgccgaagaccttcatcaacccggtaccgcacctgagcttcgtgcgcggcagcgaaggcatcgcctacctgaagaagcgcttcgaatcgctgacgaagcaccacgctttcgagaccatggtctactccgaggacaaggccaccctcgccgagtggatgccgctgatgatgccgggtcgtccggccgacgaagcgatcgccgcgacccgcgtcgagggcggtaccgacgtcaacttcggcgccctgaccaaccagctcctgcaacacctggcgcaacagccgggcgcgcagatccgctacaaccagaaggtcacccacctgcgccgcgccgataacggctggcgggtcaccgtcaaggacacccgcaacggcggcgaccgcgagatccaggcacgcttcgtcttcctcggcgccggcggcggcgccctgccgctcctgcaactttccggcatcccggaaggtaagggcttcggtggtttcccggtgagcggccagtggctgcgctgcgacaacccggaaatcgtcaagcagcaccaggccaaggtctacagccaggccgaggtcggctcgccgccgatgtccgtgccgcacctggacacccgcgtggtggacggcaagaaatccctgctgttcggcccctatgccggtttctccaccaagttcctgcgccatggctcgttcctcgacctgccgctgtcggtacgcccgggcaacatcctgccgatgctctcggtggcccgcgacaacatggacctgacccgctacctgatcggccaggtcatgcagtcgccggaacagcgcctggaagccctgcgcaagttctaccccgaagccagggccgaggactggcgcctggaagtcgccggccagcgcgtgcagatcatcaagaaagatccgaagaaaggcggcatcctgcagttcggcaccgagctggtggccgcccacgacggctccatcgccgccctgctgggcgcctcgccgggcgcctcggtgaccgtctcgatcatgctcggcctgatcgagcgctgcttcccggagcaggcccgctcgccggagtggagcgccaagctgaaggaaatcttcccggctcgcgagaaagagctggaaagcgacgccgagctgtaccgcagcgtcagcagccgttgcagcgaggtgctggaactgaccgcgaagaacgacgtgcaggccccggtcaacgccgagtgagccgcgctacggaacaagccgccttcgggcggcttgttcatttgtggagtcaggcgccggcctcgcaattgatcatccaggacaccccgaaacggtccaccagggtaccgaaacagggcgaccagaaggtcttgcccaactccagctcgacccgcccgccgtcctccagcaaggcgtcatagcagcgccgcgcctgctgcgggtcgcgggtattcagtgaaagggaaatcccggagatcggctgcaacgccggcccgtgcccgtccgaggccatgatctggctgtcgccgatctgcaggttggcgtgcatcaccttgtcgcaccagccttcgggcaccaccaccggaccgggcgcctcgtcgaaacggaacaggaaactcaccctggcaccgatggcgtgttcatagaaacgcagggcctcttcgcaacggccgttgaagcagacgtagggctggacgtacatgggaacctcggcaggctgtttttcctgtgagtgtagaaaagcagcagccgacaggcagcctctcgcagagcgaataacgcagtcctggccattcgcccttccccgccgccctggcgatccgcgaccgcggcggggcccggcccgcgcggcgtctatcgacccttgccaccaccagccgccattcggacgctggcgttctccgacgggcgtgactcggcggaccgcgcaacgaaaaaacccgccgaagggcgggcttttcgctgcatggccggctcaggcgcccttggccgcctgcagcgcttcgatgtagggcacggcctggcgctggtcggcgaccagggcgacgaagtcgttgcccttggcgtcgcgcgcgtcgagatcgtagccggcctcgcggaagaaggtgaggaagcgctcgaagtcgtcgatgcgcagaccgcgataggccttgatcagcttgtgcagcgaggggggggtgtcgtcggccggctcgacgccgaggaacagcttgatcgactcgtcactgatctcttcgccaatgatctgtttcttgtctttgcgcatcgctttctctcaacggctctggggccgggctcgcccggcgcgggataaggccaggcagtttactcccggcgcgcggcgaggctcaacgcgcgcgtaccgcgccggtgtgcaggtccgcccagacatggccgttgggataggcgaggaactggcaatagaccgtctggttgcgcagcaggtcgagcaacgccgggtactgcgccaacgggtagttgagcgtgagggtgcgggtcccggcatcgtagaccggcttcttcaggctcttgccttcgctgtcgaactggatcagcacctgggccagggtcgcgcccttgctcagcggtttgcccttcaggcgcagcagggtcggcgtggtgatcgggatcggctgctggttggactgccgctggttgcccagcaccacgctgtactcggtgatctggatcagttgctgctgctccggcgcctcctggcgcaactggccgtcgtcgggcggcaggaagcgcgcgtgcatcgggggattctcggcggccaggccggccagactgacgaacaggagcagggagccgcacaggctacgggcgaacatcgggacctccggacagggcgagccggcactctagcatggctgccgacccgccgccgaagcgaagcgctcaggcgaactgggcgcgcatccagtcccggtaggccggcgcatcggcgctgccttcggcaggcgcccaactggcgaactcgccttcgccgagcgggcggtaaggcccggccttgcattcgaacaggatgctgtccggctccagcaccaccagggcatggaacaccccgggcggcaggtcgacaccggggcagtccccagcggcgctcaactcgcgcttgtcgaggagttccccgtcctcggcgaagaccagcaggccgagacggcccttgagcacgatcagcgcctcggccttgcccgcatccaggtgccggtgcggcgggatgtaggtattcggctggaggcccaccgccatgcggtggcagggctcctccatgcggtggaagttgtgatgctggcgaccacgcggcgcgttacccgccccgctcgccagttcggcgaacaattgctggtcgaggtagcgcggtccggccatctcagagccccttgaccgcgaagatgcccgcggcgttgcgccagtagcccttgtagtccatgccgtagccgaacacgtagcggtcggcgcagtagaggccggtgaagctggccttgaggtcgggccgggccttgcgctcgtgttccttgtccaccagtacggcggtgtgcaccgcgcgtgcgccggcatgcttgcagaagtcgatgatcgccgagagggtgtgcccttcgtcgaggatgtcgtcgatgatcagcacgtcacggtcgatgaaggagatttccggcttggccttccagaacagttcgccgccggaggtctcgttgcggtaacgggtcgcatgcaggtaggacagttcgagggggaagtcgagcagcgggagcagcttgccggagaagatcaggccgccgttcatcacgcagaagaccaccgggttggtctcgccgagatcgcggttgatcgcctcggcgacgcgaccgatggctgcctcgacctcgtcgttgttgaacaggcagtcggcttccgccatgacttggcggatgtgcgcgagatcgacggacatggtgcttctccctggctgggctgagaaaaagtcggcaaaggtactcatccggtcgccatcgggcaacccccggcggtcgagtgcgaatcagaataatggtccagactgtgcggaatgcattacgctagcgcaatttttttgcccgcccccgttggagacagtcgcccatgcccgtacatgagatccgccaccccctcatccgccacaaactgggcctgatgcgccgtgccgatatcagcaccaagaacttccgcgaactggcccaggaagtcggcgccctgctgacctacgaggcgaccaaggacctgcccctggaacagtacgaaatccccggatgggccggcccggtgacggtggagaagatctccgggaagaagatcaccgtggtgccgatcctgcgcgccggcatcggcatgctcgacggcgtgctcagcctgattcccggcgccaaggtcagcgcggtcggcgtcgcccgcaacgaagagaccctggaagcacgcacctacctggaaaaactggcgccggacatcgccgagcgacgctcgctgatcatcgacccgatgctcgccaccggtggctcgatggtcgccaccatcgacctgctgaagaaggccggcagcaaggaaatccgcgccatggtgctggtcgccgcccccgagggcatcgaggcggtacgcaaggcccacccggacgtgatcatctataccgcctcgatcgacgagaagctcgacgagaacggctacatcattccgggcctgggcgacgccggcgacaagatcttcggtaccaagcagaaggaagcctgaacatgggcgatgccttccaggagccgctctggcgccaggtgctgtcaggcgcgcagatgctgttcgtcgccttcggcgcgctggtgctgatgccgctgatcaccggactggatcccaacgtcgcgctgttcaccgccggcctcgggaccctgctgttccaattggtgaccgggcgccaggtaccggtgttcctcgcctccagcttcgccttcatcaccccgatcatcctcgccaagggccagttcggcctggccgcgaccatgggcggggtggtcgccgccggcttcgtctacaccttcatgggcctggcggtgaagatcaagggcaccggcttcatcgataaactgctgccgccggtggtgatcggcccggtgatcatctcgatcggcctggcgatggcgccgatcgcggcgaacatggcgatgggcaaggccggcgacggcagcgagttgctgccgtaccgcaccgcgatgatgatctcgatgccggcgctgctcaccaccctggtggtggcggtattcggcaagggtatcttccgcctggtgccaatcatcgccggcgtgctggtcggcttcaccctgtcgttcgtcttcggcgtggtcgacaccgccgcgatcgtcgccgcaccctggctggaactgccgaaattcaccgcgccggaattcaactggcaggcgatcctgttcatcgtcccggtggccctggccccggccatcgagcatatcggcggggtcatcgcggtgggcggcgtcaccggccaggactacctgaagaagcccggcctgcaccgcactctcctcggcgacggcctggccacctcggccgccggcctgttcggcggaccgcccaacaccacctacgcggaagtcaccggcgcagtgatgctgaccaagaactacaacccgaagatcatgacctgggcggcggtgatcgccatcaccctggccttcgtcggcaagttcggcgcgatcctgcaaagcatcccggtaccggtgatgggcggcatcctctgcctgctgttcggcaccatcgcctcggtcggcatgaacaccctgatccggcacaaggtcgatctctcggaagcacgcaacctggtgatcgtctcggtgaccctggtgttcggcatcggcggcgtgctgatcggcagcggtaccggccccgacgacatcggcctgaagggcatcgccctgtgcgccatcgtcgccatcgtcctcaacctgttgctgccgggcaacgacggctggcagaacaaggcgctcgacgaacaacacaaggattcacactgaaaacaacggacggaacacttcgctgttccgtccattttccacccgccacgttattttcaaaagcatgtagccaatcgcttactactttgtaattaaacttccctgtattttccaaataatcacgtcatctaactggcagaggcttattcgcgctgctatatagccagtcaagcatgactggcgagccgctctgcgccgcacccggcgcgtcgccagccatgaacttcgagtttggcggatatataaggccgatcatttaaaagtcgtgggaactttatttatccgccaacatcgtcctgcgccaccgacattcgttatcgacaggaagttagagatgaataaacgcactccggcagtcttgttgttctgtgcctgcgccagcctgctgggcaccgcccaggccgccggtacgctgatcggccaggtcggcgtgcagatggtcatcggtgccggctgcaccatcatcaacggcagcgtcagcggcggtatcaaccagtggggaaccctggacttcggcagccattccgaccttaccaacgtggtcgacgcgcagaccgtcggcaccagcggcaatatccagatccagtgcagcaccggcctgaccccgagcctgacggtgaacgcaggcctgcacgccagcggcggccagcgctacatgcagaacaccaccaccaccagcagcaccatcgcctacaacatctattcggacgccgcgcgcagcgcgctgatccaggccaacacaccggtggacatttcctcggtctccaccggcaccgcagtcaacatccccctctacggccgcgtggtgcccaccgggcaaagcacgcccacgccgacggcggggacctacaccgacaccctgctggtcaccatcgcctggtaagacgcgccgccaggcgcggcgccgggcagcatggtcctggggggaccgatgagcctgaaccgctacctcgccggaggactgctctgcctgctcggctgcaacccggcaaacgcgcagaccgccaccatcgtcctgagcgccacgctgctcccggcctgcgaagcgggtagcgtcggcagcggtggcgcgatcaccttcggcaccctcgacttcggccagtacgcctccctgaacaacgccatcagcgccaccagccagcaaggcgcaggctccatccgggtcaagtgcgtcagcggccagacctatgcgatcacgctcgacggcgggctctacggcagcgtcgccacgcggcgcatggcgaacatcgccaacaccgccctcaccctgacctacaacctgtacagcgaccgccccggcggcatcgtctgggacaacaccaccggcgttgccgccaccggcaacggcaacgaccagtggtatcccatctacggcctggtgccggcacagaccacgccggtcgccgggacctaccgcgacaccgtcaacgtgaccatcagttggtgatgccgatgtccagccggcgtctattcctgtcgcttctcctgctcccgctgccgaacctggtcgcgcatgccgatccatcgccgatcagccgcgccttccaggtccaggcggtggtcgccaacggctgcgccttcggcaccgccatcagcgacaacgcctatgacctcggcaccctgagcttcggcaccctcggcaacctggccagtccggttaacgtcgccagcagctccggggccggctccatcgtcctgacctgcactccgggaatgaccgtctccgtcgccctcgactacggggtcaatggcggcagcagcagccagcgctacctgaagcgggtgagcggcaacgagaccctcgcctaccagctctaccaggatgccgcctactcccaggtctggggcaacggggcactcgcgcggaccatcgccaactttcccgccagcacccagacctacacggtatacgcgcgcctgttcgcggtcggcagcctgccgtccgccggcaactaccgcgacaccgtcaccgtcaccctttcgttctgagccgtcatggaggatcacatgcccagtccacacctacctctccgccccagccgctggcttgcggcgctgctggcgctgctcctgggcggcccggcacaggccgccagtgcggtgctgatctggccgatcaacccggccatcgaagccgaccagccggccacggcgctgtggctggagaatcgcggcaagcaaccggtgaccctgcaggtgcgcgtgctcggctggtcccaggcggatttccaggacgtctatcgcaaccagcaggcagtgattcccagcccgcccttcgtcaaggtcgagccgggccgccggcaactggtccggctgatccgccagggcggccagcccagcacgccggaggacgcctaccgggtgctgatcgacgaagtgcccgacggcgacgcggggcagacgcaacgaagccccggtctcgccctgcagttccagatgcgctattcggtaccgctgttcgtcagcgccgacggcgtctggacccagccgcgtagcgatgtcgagcgcgacccggccgacgcgacccggccgaagctggcctggcggctggtcgaggaacagggcaagcgttacctgcaggtgcgcaacgagggtagcgtgcacgcccgcctcagccatgtccgctgggagggcaacggccgcagcctggcgctgctggacggcctgctcggctacgtgctgcccggccggcagatgcgctggccgctgccgccggggctgctgccggactccggcatgaccctgaaactgcaactggcggacaacgacgcgccgatcagcgttcccgggtactgaggcggacgtcggtcccgtgcctcgcccgtgtcagcggcgctctcgccgccaccgctcgctactgatcggcctggcgctgctctcccctgtccatgcggcggactacctggccggactgccgccgccgcaacccgctccgtccggcggcggcaacgtcctctactacctggaactggtgatcaacggccgcgacagcggccaggtggtgccggtcaacgccgccgatggccattacctgctcgacgccgcggccctgcgcgaagccggcgtgcgcctgcctggcaaccccgccggacaggtcgcggtggacgccctgcccgaggtccgggcggactatgacagcgccagccagcaactgcacctgcaagtgccgccggactggctgccggagcagcgcttcgacgatcccggactggtcgcccgcgccccggcgcgcagcagcctcggcgcgctgttcaactacgacctgtactactcggaccccgccgacggcgccacgccctggctttccgcgctgctcgagcaacgcctgttcgacggcttcggggtgatctccaacgccggcgtctacacccgctatttcggcgacgccgacaacctcgacagccgctacctgcgctacgacacctactggctgtacaacgacgaacgcaacatgcacagctaccaactgggcgactacgtcaacggcgcgctgaactggaccaccccggtacgcatgggcggctttcgcttcgcccgcaacttcggcgtacgtccggacctggtcacctatccgctgctgcgcttcgacggccaggccgccgtacccagcaccgtcgacctgttcatcaacggctacaaggccagcagcgccgacctgcaacccggtcccttcgccatcagcaacgtgccgtacatcaacggagccggcgaagccacggtggtgaccaccgacgcccagggtcgacaagtggtgaccagcctgccgttctacgtatccaacaccctgctggcgcgcggcctgagcgatttcgacctgtccgtcgggcgcctgcgcgacgactacggcctgcgcaacttctcctatgccgacaacgccgccagcggcatctaccgctacggcgtcagcgaccgcctgaccctctccacccacgccgaggccgccagcgacctgcgcctgctcggcatcggcggcgacatcgccgtggccaccttcggcaccctcagcctggcggccagcggcagcgacggccagggcgacagcggccagcaatacctgctcggctactcctactattcgcgacggctcggcctcagcctgcaacacatcgagcgcagcgccggctatggcgacctcggcaccctggacggcgagtaccagttgagccggcgcaccgaccaggctaccgccagcctgaccttcgacgagcagggcaccatcggtaccggctacttcgacatccgcgcccgcgacggcagccgcacgcgcctggccaacctctcctacagccgcccgatcggcagccgcagcagcttctacctggcgctgaacaaggatctcgacggcgacggctacagcgcgctgatgcaactggtgattcccttcgacatcaacggcctgctgaacatcggcgtcacccgcgacagcgaccggcgctacagcgagcgggtgatctggagccgctccacaccgagccagggcggcctcggctggaacctcggctatggcggcggcgccagccgctaccagcaggccgacctgacctggcgcatgcagaacgtgcaactgcagggcggcctctatggcgagaccggcaactacacgcgctgggccgatctcagcggctcgctggtatggatggacaacgccgtgttcgccagcaatcggatcaacgacgccttcgtcctggtcagcaccaagggttatccacaggtgccgatccgctacgagaaccaactgatgggcagcaccgacgacaacggccacctgctggtgccctgggtcgcggcctactacccggcgaagttccagatcgagccgctggaccttccggccaacgtcagcgcgcccgaagtcgagcagcgcgtggcggtacgccagggcagcggcctgctgctggatttcccgatccgtgccgtagtcgccgccagcatcagcctggtggacgagcgcggcgaaccgctgccgctgggcagccaggccgaagaaaccggcagcggccagcgcgccagcgtcggctgggacggccaggtctatttcgaaggattgcaaagcgacaaccagctacgcgtggtccgccccgacggccgggcctgccaggcacgcttccgcctggacacgcgcaaacccaccgtcagccaggtcggcccgctgacctgctcggccccgatcggagatacgccatgagccgccactccacgtccgcctgcctgctcggcttcgctacgctctgcgccagcccgttgctgctcgccgcctgcaccaccagctccggcaccggcaatttcggcagcctgagctcgttcaccgtggccagcaccgcccagaccatcaccggcaccaccggcttcaagtgcaccggcagcctgttgtcgatcctcagcaccaacaccatcgacgcgaccatcgccagcaccgccaatccgctgggcaccacgccgcggctgtacaacgccgccagcggcacctacctgccctacagcatctgcaaggacaacggctgcggcaccgtctacaacgtcggctcgacggtacgctggagcagcaccaccttcctcggcatcctcggcctgttcaacgccaccgacggcagcctgccgctgtacctgcgcaccgccaccggggtgaccctgccggccggcacctataccgataccatcggcctgaactgggcctggcacctgtgcgcggcgggcatcggcccagtctgcgtatacgacgacggcaccgccagcagcagcgtcaacgttaccctgacggtgctcaaggactgcttcatcgacagcgctccggacctcagcttcggcagcgccgcgctggtctcggccttcaccgcggtgaaccagaacattggcgtgcgctgcaccctgaacgccacctataccatcggcttcgacaacggcaacaacttcagcggcggctggcggcgaatgctcagcggcgccaacgcgatccagtacaacctctacaaaccgggagactcgacggtctggaccaccagcaacacccaggcaggcaccggtagcggcgccgcgcagaacgtgccgtaccgggccatcgtcaacccggcccagggcaacgtccccgccggtacctacagcgataccgtgcgggtcatcctcacctactgagtcaggccggctgccgggacgccttccaatcctcgccgccctcgccttcccgtcgcaggctccagtccttcaggtgctccaggctggcgcgatagggcttgaggccgatccccagcaggaccaccgcaccgagcaccgcggccagggtcaccagcagcagcgagtagcgcagcgccatgtcgtcggcgaagacgaaatcggtgaccagcgccaccgccgtcgggcccacgccgagaccgaacagggtgaccacgaacaggtagatcgccgaggcctggccgcgcatcgagttgggcatgatctcctggatcgccgccggggccacgccgaacggcatgctcaggaagaacaccgtcggcgccatcagcgccgccgcccaattggcgttgtccagcagcggatagaccagggtgaagggaatcaccgccaaggcggcgagcagcccgacgcgcatgttcgcgtcgctacgcccgcgcttcgcccagtagtcggccaggcgcccgccgaagacgatgccgagacagccgaacaccgcgacgatgctgccgtagaccaccccgacatgaccggcgtcccagccgtgggtgcggacgaagaaggtcggcacccaggcgccgctgccgtagccggcgaaggacaggcaggcgaaaccgaagttgtggcagagcacggtcttgcggttggcccgcaggtaggcgccgacctcgcccagcggcaccgccacgcctgcgccgactccgcgccgggccggctcgcggatagccagcagcaacaggcagaagagcacgccggcggcgccgaggatgaggaagatcagttgccacgggcgcacctcgccgaacagcggcagatgcacgtcgccctgggccgaggcgaacttgatcaccagcccgccgagcaggaaggccagccccgagcccaggtagatgcccatcgagtagacgctgatcgccgtcgcccgacgctcgcgcgggaagctgtcggcgatcagcgaataggccgctggcgacagcgccgcctcgccgaccccgacgccgacccggaaggtgaggaattgccaatagctgcgcgccagaccgcaggccgcggtcatcgcgctccacaccagcacgccgaacaggatcaggccgcgccggctgcggttgtcggccatgcgtccgagcgggataccgcaaagggtgtagaacagggcgaaggacaagcccatcagcaggctcatttccgtatcgctgatggccaggtcgcggcggatcgggccgaccagcaggttgaggatctgccggtcgatgaaggacagcacataggcgaccatgaggatcgccaccgtggtccaggccgcaaggttggagggatagccgttattgttgttatgcatgccgaactcctggacgccgccgaagcggcggatgcgaagggagggtcgacaggcaggataagccggcaacatccgggcttatacccagggcaagggactatagaactgctgaatgcgggaagcgggttccggcgaatgaccgccaggtcattcgccgccgcatgcgctcagagcctgtccagcatctcgcgagctgggcggggaagcggagctgacgagcggcaaatgagcacttcaaagccgtcataccgcgccgcgcagcggatcatgaacaggctctcagagcggcctggccaagcgcccgctcatctcggccagggcgccgacccaggcggggtggtcgttgaggcagggaatcagcaccaggtcctcgccgccggcactgatgaactgctcgcggccgcgcatgccgatttcctccagggtctcgatgcagtcggcaacgaacgccggacacatcaccagcaggcgcttcaccccgcgctgcaccagttcgtcgagcttggcgtcggtatagggctcgatccacttggcgcgccccaggcgcgactggaacgacaccgaccagcgcccctgctccaggccggcgcgctcggcgaaggcctcggcggtgcgcaggcactggctgcggtagcagagggcgagggcttcggggctgacgttgcggctgttctcggccagcaggtcgtgggcaggatccttcaccagcttgcggatgtgccgctcgggcaagccatggaagctcagcaacagatggtcgtggggctgctgcaggtacggacgcacgctttccaccagggcatcgaggtagaccggctggtcgtagaacggcggcagcgtgctgacctccaggcccaggcgatgggcggcgatcacccggcgcacctcctgttcggcggtggtcgtggtgctgtcggcgaactgcggatacagcggcgccagggtcacccgccggataccacggcgcgccaggtcgagcaggaccttctcgatggccggctggccgtagcgcatcgccagttccaccggcccatgcggccagtgcggcttcatcgcctcctgcaggcgacgactgaggacgatcagtggcgacccttcgtcccaccagatcgagctgtaggcgtgcgccgattcggccggacgcttgatcaggatcagcgacaccagcaggcgccgcagcggccagggcaggtcgaccacgtagggatccatgaggaactggtcgagatagcggcggacatcctccacccgggtcgaatccggggagcccaggttgagcaacagcagggcattctcggtcatgcctgatcctttcgtcgggcgtccaggacatcggccagcgccacgtccaggtcggtgaattgaaaacggtagccggcgtcctgcaagcgttgcggcaaggctcgctggccgccgagcagcaatccggacatttctcccagcccgaggcgcaggacgaacccgggggtcggtatccgcgccggcttgtgcagcgcccggcccagggccttggcgaaatcgcggttgcgcaccgggttgggagcgcacgcattatagggaccgctggcatcgggccgccgcaaaagaaaatcgatcagctcgatttgatcctcgatatgaatccacggcatccattgccggccgtcacccagcggtccgcccaggccgagccggtagagcggcaacaggcgcccgaggaagccgccctcgggggccagcaccaggccggtgcgcaacagcacgacacgggtgccgagcttctccgcctcgcgggcgatctgctcccaggcgaggcatagctcgctggcgaaatcctcgccggccgccgccccctcctcggtcaccgggcgctcgccgctgtcgccataccaacccaccgcagaacccgataacagaaggtccgggcgctgctcgcgagcgtccagccattccaccaggcgctcggtaaggcgtacccggctttcccacagcagcgccttgcgcttgtgactccagggtttgtccgcgatcggctcgccggccaggttgaccaccgcgtcgagcggctggtcgccgtactcgtcgaaacgatcgatgccgcgcacgccgacgccgcacagcgattccacctgctgcggccgccggctgaacacggtcagccggtgcccggcctgtcgccagcgggcgcacaggcggcgccccatcaggccggtaccgccggtcaagagaatgtgcatggctgtctcctcgttttgcctgcatgccctttcagtctggaccctggacatcgatctgcccgatgaccgtgcatcctccccccattccagcgttatcctgtggatggaagatccgtcggctccggccggggaaccctggcgtcgttttcgactcagccaaggaacagggcttgcatcgcactggtgccttagtgaacggcgccagccgtctattcttcagataactcggttgatacttccgaacggaacgtctgaaggttcgacaggccaggaagcgagccgtgcgccgcaggcgcgccatcggcgcgatgcaaggtgcgcctcgaagcacgcgcaatactgtacattaaatcaagcttgtacaagaaacctgattcgcctgtccagacgctacacaaccagagaggcatgtcatgagcgtccccatcgccatcatcggtactggcatcgccgggctttccgccgcccacgcattgagatccgccggccagaccgtacaactgttcgacaagggccacggcagcggcggccgcatggccagcaagcgcagcgaggccggcacgctggacctcggcgcgcaatacttcaccgcccgcgaccggcgcttcctcgacgccttgcaacactggcgcgaggaaggctgggtggacgagtggaaacccgctctctaccaataccgcgacggccagctgagcccctccccggacgagcagccacgctgggtcggcatcccacggatgagtgcgatcacccgcgccctgctcaccgatctgcaagtggtcttctcctgccgcatcaccgaggtcttccgcggcaagcagcactggcacctgcaggacgccgagggacagaaccacggtccgttcaaccaggtcctgatcgccatccccgctccccaggccacgccgctgctggccagcgtgccgaaactggcggccaccgccgcgagcgtggtcatggagccgacctgggcggtggcgctgggcttccgcgaggtactcgacaccccggtgcagggctgcttcgtgcacgacagtccgatcgcctggctggcctgcaatcgcagcaagccggggcgcgacaccaccctcgacacctgggtgctgcacgccaccagccagtggagccggcagcacatcgacatggccaaggaggacgtggtcgagcacctgcgctgcgccttcgccgaagtgatcggctgcgccgtaccggaagccgccttcagcatcgcccaccgctggctctatgcacgcccggcggaggcccaccagtggggcgccctcggcgatcccgacctgggcatctacgcctgcggcgactggtgctccagcggccgcgtcgaaggcgcctggctcagcggccaggaagccgcgcggcgcctgctggaacatctctgaggggatcgggccgtcgcctggcggcccgatgtgacaagaaaatacctatacaaatacattgacctgtacaagataagttctaggatgtgtcgtatgaccgcctggctgtcgagctgcgcgcgaacctcctttcccctcgggagacgacaccgatgcacgaatctcacccttccctgacgccccgactcggcatcagcgcctgcctgctcggcgaaccggtgcgcttcaacggcggccacaagcgatccgcgctttgcgaggaactggcgcgacacgtcgagttcgtctccttctgcccggaacaggccatcggcctgggcacgccgcgcccggcgattcgcctggaaggcactccggaagccgccgaggcgcggagccgcgacggcctggcggtcggcggagcgctcgccgaatatgcgcggagggtggcgcaacgggcggatacgctggacggtttcatcttcatgcaacgctcgccgtcctgcgggctgcaacgggtcaaggtctatccagaaggcggcggcgcgccgcgcgccgaaggccgtggacgcttcgccgcagccctttgcgaagccttgccggagctaccggtggaagaagaaggccggctgcacgatccggtcctgcgggagaacttcctcacccgcgtgtatgcccatgcccactggcaggccctgcgccagcgcggcctcagccattcggccatcgtcgccttccatagccgctacaagtaccagttgctggcccattcgccggagcactaccgcagcctcggccgcctgctcggcgaagccggccactaccagccggaagccctcggcactcgctacttcggcgagctgatgcagggcttgcgccgctgcgcgacccgcggcagccatggcaacgtgttgctgcacctgagcggctacctgaaacgcgacctcgcaaccgaagacaggcgtgaattgcgcgagctgatcgagcaataccggcatggcagcgtgccgctggtggtaccgctgaccctgctaaagcaccacttccgtcgccacccgcatgcatacatcgcccagcaggcctacctgcaaccgcacccgaccgaactcggcctgcgcaacgcgctctaggatttcccgatgaactcgccccacctcgaacgcggcggcctgccgatccgcgaagtcactcgtctgaccggcgtccatccggtcaccctgcgcgcctgggagcgccgctatggcctggtggtgccgcaacgcaccggcaaggggcaccggctctacagcgaagagcaggtcgagcgcatccgccggatactcgtctggctcgagcgtggcgtcgccatcagccaggtgcgcgcgctgctggagcgtccggaggaaaccccggcggcggatgtcgaatccccctgggaacgcctgcacgaacagctgctggacgccatcgccgcgctggccgagcgacgcctcgacgatctgttcaaccaggccgcgtcgctctatccggtagcgaccctctgcgaaaagcttctgcaacccttgctgcagcacctcgaacgacgctggcagggacagttcggcgcgcgcatggagcgggccttcttcttctcctggttgcgcagcaagctgggcgcccgcctttatcaccagcaacggctgcaacagggcacgccgctgctgctggtcaaccagtccgagctgtcgctggaaccgaacctctggctgtgcagttggttgctcagcagcggcgaggtgccgctgcaggtcttcgactggccgctgccaccggccgaactggccctggcctgcgaacgcctggaagctcgcggcgtgttgctgtacgccagtcatcgcctcaatccggagcacctgccgcgcctgctggcaggggtgagctgcccggtggtgctggtcggaccggccgtggagatccagcgcgaagccttcgaaaccttggcgctaactggcctgctgctggcgagcacgcccctggaagcccgccgcctgctcggcgaacgaggcctgttgaacccatgaacggacttccgatgaacctgatctggtttcgctgcgacctgcgaaccaccgataacagcgcgctcctcgccgccgccgatgggcgcccttgcctggctctctacctgctcagcccggcgcagtggcgggaacacgacgatgcgccctgcaaggtcgacttctggctgcgcaacctgggcgagctgcaacgccagctcgccgcgctgaacatcccgctgctggtgcgcgactgcggccactggcggcaagccccggaagtcatcggccggctctgtcgggagctgggagtcggcgcggtacacgtcaaccaggaatacggggtgaacgaggaacgccgcgaccaggccgtcggccaacgcctgcgtgaacagggcgtggccttccacagccacctcgaccagctgttcttcgcccccggctcggtgctgacccgaactggcggctatttccaggtgttcagccagttccgcaaggtctgccacgaacggctgtaccaggccctgccgggtgtccgcccgcgtccgcagccccaaccaccgcacgcgctggccagcgacccgctgccggatgccgtgcccgccttcccgcggccggccgatagcttgcgccgcctctggccggcaggcgaagaggtagcgcaggaacgcctgcgcgacttcgccgaccagcacctggccgactaccatgaacggcgcgacttcccggcgcttcccggcaccagccaactgtcgccctacctggccgccggcgtactctcgcccaggcaatgcctggacgccgcgctggttgccaaccgcggcgagttcagcggcggccagcaaggcgccgcgacctggatcaacgagctgctctggcgcgagttctacaagcacatcctggtcggctacccccgggtctcccggcaccgccccttccgcgaggagaccgaagccctgcgctggcgccaggccccggcggaactcgaagcctggcaacaggggcgcaccggcataccgatcatcgacgcggcaatgcgccagttgctcgccaccggctggatgcacaatcgcctgcggatggtggtagcgatgttcctcagcaagaacctgctgatcgactggcgcgaaggcgaacgctggttcatgcgccacctcatcgacggtgacctggcggcgaacaacggcggctggcagtggagcgcatccaccggcaccgacgcggtcccctacttccgcctgttcaatccgctctcgcagtccgaacgcttcgatccacgcggcgagttcatccgccactggctgccggaactggccggcctggagcgcaaggcgatccacgatccgtccagcctggggctgttcgccggggtcgactatccacggccgatggtcgacctgaaggccagccgcgaacgggcgctggcggctttccgcaacctgccgccgcgcgatggtcgcgcgtagggcgcgtcagcgagctatcgcctcccgccaaatggctcgctctttccatagggcggtgcggcggggcggaagaatcgcaggcatgaaaaagccgggatgaacccggcttttttcgcccgtgccgactagatcgggatcttgtagaacaggctgtaggactcgataccgtcgttcggctgtttcaggccggcgttggaatagtggatcgcccgaacgccgaccgactggccgttggcgaacttcaggccggcgccgatgcggtcttcgaagttcagggaggaacccaggttctggtcgccgacacgggtgccggagaacgccgccacgccgataccggcctcgatgaatggcttgatcgagtcgccggcgaactcgtagacgaataccggagcgaacgacagcgaatgcttgccggcgccttcatcgccaccttcccaataggtgtagcccgcatcccagtagccggtcaggcgcccggtggaggtctgccaccagctcttgtcccaatcccagctcaggcccaggcgataggtcatgcccgactggccggtcgcaccgacggcggccgagacgtccgccgcctgggcggacgccacgtggacggaggaaagtgcggccagaacggccagcggaagtagtttcttcattgaaacgtccttttcgaaagttgcatgaaagcccccgcattcaagctgcgcattataagagcgcacttactaaagcagatactagaccaaacgctttagttcaaaaaatcgctgacacgtctgccaggaacgactaaacgactaattttcctacgctttccgggcttccccagaggatcggcaggatcctttccatctcctccggcagcgcgctggtccagaaacgcggcgtcgcggcctggccagaggccagtagcgcccgcgccgacaatacgcgctccagctgccgggcgacagccgctcccgtatcgatcaccgccatctccgccgggatcagctcggccagcaggggtttgacaaagggataatgagtacagccgaggatcagcgtatcgcagccctgttcgaggatgggcgccagcaggcgttccagcagtgcccgggtttgcggcccatagagatcgccggcttcgatgcgctcgaccagccccgggcagggctggatgaagacctgtacgtcgctggcgaagcggtcgagcaaggcggcgaaacgcgcgctcttcagagttccggtggtggccaggacgccgacccgaccgttgcgggtggccgccgcggccggcttcaccgcaggctccatggccaccagcggcacctgcggataacgttcgcgcaattccgccgcagccgcagccgtcgcggtattgcaggccagtaccagagccttggcgccctgctccagaaggaaatcaccgatccgctcgcagcgttcgcggatgtactccgcgctcttctcgccgtagggcacatgggcgttgtcggcgacgtagagcaacgattcggatggcaggcgcgcgcgaatctcacgcaatacgctgagcccgccgaccccggaatcgaaaacgccgaccgcggccgactcaaccgccatggcgttgcccacagacggcacaggaaggatcgcgacgcacccgcaattcgcggaagcgcgtgccgagggcgtccaccagcagcaggcggcccaccagcggttcgccgaaaccggccagcagcttgagcgcctccagcgcctgcaggctaccgaccagccccaccagcggaccgatcacgccggcctcgctgcaggtcagctcggcctcgctgccgtgcccgtagaggcagtggtagcaggggctttcgtcgcggcgggtatcgaataccgaaagctggccctcgagacggatcgccgcgccgctgaccaggggcttgccggcgcgcacgcaggcgacgttgaccgcctcgcgggtggcgaagttgtcggtgcagtcgagcaccaggtcgaccgccgccacggcggcatcgagggagtccttgtccagcgcggcgctatggctgaccaggcggatctgcggattcagcgcgcccagccggcgcatcgccgactccaccttgccgacaccgacgctggtgccatcgtggatgacctgccgttgcaggttggtcaggtcgaccgtatcgaaatccgccaggtgcagctcgccgaccccggccgcggccaggtacagcgccaccggcgaacccaggccgccaagaccgacgatcagtgcgcggctgcgctttaggcgcagctggccctcgacgtcgacctgcgccagcaggatctggcgactgtagcgcagcagttcctcgtcgctcagcatgcccattgtccgagagtgatccgctcgttgccgccgaggtcgcgcaacgtatgtaccccggcgaagccgcgggcgccgagcagttcgcgcaccgccgccccttgatcatagccgtgctcgagcagcaaccagccttcgtccagcaaatgctgcggcgcctgggcgacgatctggcggatgtcgtcgaggccatcgctacccgcgaccagcgcgctcttcggctcgaaacgcacgtcgccctcgctcaggtgcggatcgctggcagggatatacggcggattgccgacgatcatccggaagcgtcggccatcgagagcggagaaccagtggctgcggcgcacctcgacgttctccaggagcagccgctggcgattgcgctcggccagcgccacggcctcttccacgcggtccaccgcagtcaccgtccacagcggccgttcgctggccagggccagggcgatggcgccggtgccggtgcccaggtcgagcacggtagcggtgtccgccgcgagggtcgccagcgcggtttccaccagcagttcggtgtccgggcgcgggatcagggtgtgtggcgcgacctccaggtccaggctccagaagccctggtggccaagtatgtaggccaccggctcgccgttgcgccgacgggcgatccagtcgtcgaacagctcgttggcctcgcgcggcacgatgcgctccggccaggtacgcaggaagctgcgcggcttgcccatcgccgccgccagcagcaactcggtgtcgagccgggcgctgggcgaatcgggcagttgggaatccttgagaagggtacagatagtggtcatgtcagtcgcccagggccgccagttgatcggcctggtattcctgcagcagcggctcgatcacctgttccaccgcgccctccatcacctcgcccagggagtacagggtgaggttgatgcgatggtcggtgacccgcccttgcgggaagttgtaggtacggatgcgctccgagcggtcgcccgagcccaccagcagcttgcgcgtactggcgatcgcctgctgtgccgcggcctgctgctggtcgttgagcttggccgccagccaggccatggccttggcgcgattcttgtgctgcgagcgctcttcctggcactcgaccacgatgccgctgggaatgtgggtgatgcgcaccgccgagtcggtcttgttgacgtgctggccgccggcaccggaggaacggtaggtgtccacccgcaggtcggccgggttgatctcgatcgctgcctgctcgtccggctccggcagcaccgcgacggtgcaggcggaagtgtggatccggccctgggattcggtttccggcacccgctgcacgcggtgcgcgccggactcgaacttgagcttggcgtagacgttgtcgccctcgacccgggcaatcacttccttatagccaccgtgctcgccctcgttctccgacagcgtctcgatccgccaaccctggcgctcggcgtagcgcgaatacatgcggaacaggtcgccggagaagatcgccgcctcgtcgccaccggtgccggcacggatctccaggaacacgttgcggctgtcgttgggatccttcggcagcagcatgcgctgcaggctgtcgccgagggcggcgaggcggccgcgcgcttcggcgacctcctcctcggcgaggtcgcgcaactccgggtcgctgtccttgagcaacgcctgggcaccctcgaggtcggcctgcaccttgcggtagtcgcggaacgccaggatcaccggttcgacctcggcgtactcgcgggaataggcgcggaagcgggtctggtcactgatcacctcggcgtcgccgagcagcgccgtcagttcttcgtagcgatcgctgaggacatccagctttttcagcagagaagctttcatgcaggcataggtaccggtcagtggcgcggcgcgccctcgtcgagggcgaacagctcctgggccagggccagcgcgtcgatgcggccctcggcggacattttcttcatctgcacgctgggcgcgtgcagcagtttgttggtcaggccgcgggccagctgggccatcacctcggcggggtcggcaccgttggccagttgccgctgggccttgcccagctcctcatcgcgcaggcgctcggcctgctgccgataggcgcgcagcacgtccaccgcggccagttcgcgcaggcgctgcatgaactcggcgacgccgctgccgaccagttcctcggcggcctgggcagcgccctggcggctcttgagattctccgccactacttcgtggaggtcgtcgacgctatagaggtagacgtcgtccagttcgccgacttccggctcgatgtcgcgcggcacggcgatgtcgaccatgaacatcggcttgtgcttgcgctgcttcagcgcgcgctccacggcgcccttgccgaggatcggcaactggctggcagtggagctgatgacgatatcgctgttggccaactcctcggggatctccgaaagcagcaccgcatgggcgccgaactgctcggcgagcaggctggcgcgctccagggtgcggttggccaccacgatgcgcttcacgccttgctcgaacaggtggcgcgcgaccagggtgatggtctcgccggcgccgatcagcagcgcctggctgcggtgcaggtcgctgaagatctgcttggccaggctcaccgcggcgaacgccacggacaccgggttctcgccgatggcggtatcggtgcggacggtcttcgccgtactgaaggtggcctggaacaggcggccgagcagcggaccgacggtgccggcctcgcgcgcgacggcgtaggccgacttcatctggccgaggatctgcggctcgccgaggaccatcgagtcgaggccggaggccacgcgcatcatgtggcgcaccgcgtcttcgtcctggtgcacataggcacaggcgcgcaactcgtcgagagtcaggcgatggtagtccgccagccaggcgagcacgtcgtccgcggtcggatggtcgatctccaggtagagttcgctccggttgcaggtcgacaggatggccgcttcgcggctggtggtcaggcggcagagctgctgcagcgcctcgaccatctgttccggagtgaaagccacgcgctcgcggacagccaccgaggcggtcttgtgattgatgccgagggcaatgaaggccatgcaggatcgctgagctaatcggggaaacgcgcaattctcctacttcgccaagggcaggacaaccattgccgatgtattgaccccatagacagcttcgtcgacgcccgtcccggcccccttgggcttgccggacggcttatgtcatgatggcgccaccctcgcaggttcaaggccggctttcttcctctatgaacaaatcccttgcgctgctgaccgtcacgctgctgctcggcggctgccagtcacttatccacaagactcccgatggcaccccgccggtggaagacaccgcggtcgagaccaaggccaagccggaaaagtacggctccttcagcgaggacagcctgtattcgctgctggtggccgaactggccgggcagcgcaaccgcttcgacatcgccctgagcaactatgtggtgcaggcgcagaaaacccgcgaccccggggtttccgagcgcgccttccgcatcgccgaatacctcggcgccgaccaggaagccctcgacacctccctgctctgggcgcgcagcgcgccggacaacctcgatgcccaacgcgccgccgcgatccagttggcccgcgccgggcgctacgaggagtccatggtgtacatggagaaggtcctcaacggccagggcgacacgcacttcgacttcctcgccctgtctgccgcggagaccgacccggatacccgcgccggcctgctgcagagcttcgaccacctgttgaagaaatacccgaacaacggccagttgctgttcggcaaggccctgctgctgcaacaggacggccgcccggatgaagccctgaccctgctcgaggacaactccgcaagccgccacgaagtcgccccgctgctgctccgctcgcgcctgttgcagagcatgaagcgcagcgacgaggccctgccgctgctcaaggccgggatcaaggaacacccggacgacaaacgcgtgcgcctcgcctacgcgcgcctgctggtggagcagaatcgcctggacgacgccaaggccgagttcgccggactggtccagcaattccccgacgacgacgacctgcgtttctccctggcgctggtctgcctggaagcccaggcctgggacgaagccaggatctacctggaagaactggtcgagcgcgacagccacgtcgacgccgcccacttcaacctcggccgcctcgccgaggaacagaaggacaccgcgcgtgccctcgacgagtacgcccaggtcggcccgggcaatgacttcctcccggcgcaactgcgccagaccgacgtcctgctcaaggccggtcgcgtcgacgaagccgcccagcgcctggacaaggcgcgcagcgagcaacccgactacggcatccagctgtacctgatcgaagccgaggcgctgtccaacaacgaccagcaggaaaaggcctggcaggccatccaggagggtctgaagcagtacccggaggacctcaacctgctctacacccgctcgatgctggcggagaagcgcaacgacctggcgcagatggaaaaggacctgcgcttcgtcatcgcccgcgagccggacaacgccatggccctcaacgccctcggctacaccctggccgaccgcaccacccgctacggcgaggcccgcgagctgatcctcaaggcgcacaagctgaacccggacgacccggcgatcctcgacagcatgggctggatcaactatcgccagggcaagctggccgacgccgagcgctacctgcgccaggcgctgcagcgctaccccgaccacgaggtcgccgcgcacctgggcgaagtcctctgggcccaggggcgccagggcgacgcccgggccatctggcgcgaatacctcgacaagcagcccgacagcgacgtgctgcgccgcaccatcaagcgcctgaccggcgccgagactccttgaaaccatgcgtctacgtcttttcctcgccgcctccgcgctggccctgctcagcggctgcgccggcctgacctcccacgaagccctggaaggccagggcgatgcgcagacttggaaaacccacaagcagcagctcagcgagctggatgcctggcagatcgacggcaaggtcggcatccgcgccccgcgcgactccggcagcggcaccctgttctggctgcagcgccagggctactacgacatccgcctgtccggcccgctcggccgcggcgcagcacgcctgaccgggcgtgaaggcgcggtgagcctggaggtcgccgggcagggccgctaccaggcggagtccccggaagcactgctggaagaacaactaggctggcgcctgccggtctcgcacctgctctggtgggtacgcggcctcccggcgccggacagcaagagccgcctgaccctcgacgccgacagccgcctggcgcgcctggaacaggacggctggcagatcgaatacacccgctacgccgaacagaacggctactggctacccgagcgcctgaaactgcacggccaggacctcgacgtcaccctggtgatcaaggactggcagccgcgccagctcggccgctgacatgagcgtgcgcctcagcctgccagccccggccaagctcaatctgttcctgcatatcctcggccgccgcgacgatggctatcacgagttgcagaccctgttccaattcctcgaccacggcgacgagctgcatttcgaagcccgccaggacggccaggtacgcctgcacacggaaatcgccggggtgccgcacgacagcaacctgatcgtgcgcgccgcgcgcgggctgcaggaagcctccggcagcccgcaaggcgccgacatctggctggacaagcgcttgcccatggggggcggcatcggcggcggcagctccgacgccgccacgacgctcctggccttgaaccatctctggcaactcggctgggacgaggaccgcatcgccgccctgggcctgcgcctgggcgccgacgtgccggtcttcacccgcggacgcgcagctttcgccgagggcgtgggcgaaaagctcaccccggtggacatcccggagccctggtatctcgtcgtggttccgcaagtacttgtcagcacagcagaaattttttcagatccactgttgacacgcgattctcccgccattaaagtgcgcaccgttctcgagggggacagccgaaacgactgtcagccggtagtcgagaggcgttacccagaagttcgtaacgctttgatcttgctaaacaaatttgtttcagctagattaaccggcactggaggttgtgtgtttgggagcttcccaaacaaagctgaagctgataaagtctcggcccttcttccaggccaccttcagaggttcgtcgccaaaggaagcaacatctcgatgttgcaccggaagctggaaactctggtctgagaaaggaatgccgaaacggcattcgagcaataccacaggggcgtcgccaagcggtaaggcagcaggttttgatcctgccatgcgttggttcgaatccagccgcccctgccattttcctcttctgtatttcatccggatcccttcggtcgacacaggtacctgtagcgtgtccaagatgatggtcttcacggggaacgctaaccccgatcttgcacgacgcgtcgtgcgtcagctgcacattcctcttggcgatgtttcagttggcaaattctccgatggcgaaatcagcgtcgaaatcaacgaaaacgtccgcggcaaggacgtattcctgattcagccgacctgcgcgccgaccaacgacaacctgatggaactggtggtgatggccgatgccttccgccgctcctcggccactcgtatcaccgctgtcatcccctacttcggctatgcccgccaggatcgccgtccgcgttccgcccgcgtggccatcagcgccaaggtagtggccgacatgctgaccgtcgtcggggtcaaccgtgtcctcacggtcgacctgcacgcggatcagatccagggcttcttcgatatcccggtagacaacatctacggttcccccgtgctggtggacgatatcgaagaccagcgcttcgagaacctgatgatcgtctccccggacatcggcggcgtggtgcgcgcgcgcgccgtggccaagtccctgggcgttgaccttgcgatcatcgacaagcgtcgtcccaaggccaatcagtccgaagtgatgcacatcatcggtgacgtcgaaggccgtacctgcgtactggtagacgacatggtcgataccgccggcaccctcggtcacgccgccaaggccctgaaagagcacggcgccgccaaggtcatcgcctactgcacccacccggtgctgtccggccgtgccatcgagaacatcgagaaatccgtactggacgagctggtggtgaccaacaccatcccgctgtccgccgctgcccaggcctgtggccgcatccgccagctggacatcgctccggtcgttgcggaagccatgcgccggatcagcaacgaagaatcgatcagcgcgatgttccgctgaggcccagcctcggcgaacgcgcctgaacgaaaacgccccgctccggcggggcctttgaaatcgcccgaacgctggtcgcaagcgttcgggcgcattgttatttttggagatacacaatggtcgactttattctgaatgcccaagtgcgttccgatctggggaaaggtgcgagccgccgcctgcgtcgtaacgccggtctggttcctgctgtcgtttacggcggcgacaaagagccccagtccgtaaccctggaactgcgcgaaatcgccaagctcctggaaaacgaggctgccttcagccacgtgatcgccctgaacgttggcggcgccaaggaaaccgtactgatcaaggccctgcagcgccatccggcgaaaggcttcgtgatgcacgccgacttcctgcgcgtggtcgccgaccacaagctgaccgcccacgtaccgctgcacttcatcaacgaagaagtagccgttggcgtcaagcaagccggtggcgagatctcccacaccatctccgaagtcgaagtttcctgcctgccgaaagacctgccggaattcatcgaagtcgacatggccaaggtcgagctgggccagatcgttcacctgtcggacctcaaggctccgaaaggcgtcgagctggtacaactggcccacggcaacgacctggccgttgccaacatccacgcttcccgcgtggtgaaggaagaaggtagcgaagaaggcgccgccgagtaattcattactcgatcgcctttttatagagaggggctcccgtcgtgactgccgtacaactgatcgttggcctgggaaacccgggtcctgaatacgaccagacccggcataacgcgggggcccttttcgttgagcgcctggcgcatgcccagggcgtcagcctcgtggctgaccgcaagtatttcggcctggtcggcaagttcagccaccagggcaaggacgttcgtctgttgatcccgaccacctacatgaaccgcagcggccagtccgtggcggcgctggcgggattcttccggatcgccccggacgccatcctggtggcccacgacgaactcgacatgccccctggcgtcgccaagctcaagaccggcggcggacacggcgggcacaacgggttgcgcgacatcatcgcccagctcggcaatcagaattctttccatcgcctgcggcttggcatcggccatccggggcacagcagcctggtttccggttacgtgctcggtcgcgccccgcgcagcgagcaggaactgctcgacaccagcatcgacttcgccctcggcgtgctgccggaaatgctcgccggggactggacccgggcgatgcagaagctgcacagccagaaggcctgaaccacttttctagcgcctgtctgagcgcgagggacatagcatgggattcaactgcggcatcgtcggcctgcccaacgtcggcaagtccaccctgttcaacgccctgaccaaatccggtatcgcggcggaaaacttcccgttctgcaccatcgagccgaacagcggcatcgtgccgatgcccgacgcgcgcctgaacgccctggccgagatcgtcaagcccgagcgcgtactgcccaccaccatggaattcgtcgacatcgccggcctggtggcgggcgcctccaagggtgagggcctgggcaacaagttcctcgccaacatccgcgagaccgacgccatcgcccacgtggtgcgctgcttcgaagacgacaacgtgatccacgtgtccaacagtgtcgaccccaagcgcgacatcgagatcatcgacctcgaactgatcttcgccgacctcgacagctgcgagaagcaactgcagaaagtcgcccgcaacgccaagggcggcgacaaggaagccctggcccaaaaggccctgctggaaaagctcatcccccacttcaccgagggcaagccggcgcgttcgctgctgaagaacctcggtgacgaggagaagcgcctggtgcgcagcttccacctgctgaccagcaagccggtgatgtacatcgccaacgtcgccgaggacggcttcgagaacaacccgcacctggatgtggtgaaggccatcgccgaggaagaaggcgcggtggtggtgccggtgtgcaacaagatcgaagccgagatcgccgagctggaagacggcgaagagaaggacatgttcctcgagtccctcggtctcgaggaacccggcctgaaccgtgtgatccgtgccggctacggcctgctcaacctgcagacctacttcaccgccggggtgaaggaagtccgcgcctggaccgtccgcgtcggcgccacagccccgcaggccgccggcgtgatccacaccgacttcgagaaaggcttcatccgcgccgaagtggtcgcctacgacgacttcatccagttcaagggcgaacagggcgccaaggaagccggcaaatggcgcctggaaggcaaggactacatcgtcaaggacggcgacgtgatgcatttccgcttcaacgtgtaatccccttcccgtcccaggaaagccccggccaagcgccggggctttttcgttcccgtccctccccaccgcccgctctccggcgatccgaccccttccgtctaaacgattgaaagatcagaaaattatctagccccaggggttgacagccccgcccgagatacggaaaatgcgcgccactcggctacatagctcagtcggttagagcgcagcattcataatgctgatgtcccaggttcaagtcccggtgtagccaccatatttttcaaggggttagcgcaagctaaccccttttcttttgcctgtggtgactacaaagtgactacagcgtgtctacctcttccctcacccctgcctctgccctacccttcggccatcagccagtagagacaagggacatgttcagcgaactcggcttttctatgtttgacgtgcttcttcccattgcctgcactatcggtgcgatctttgggagcctggcacagacaatggtcgcgaattacaacctcactcaccttccccgccaggaaggagatatgaaactcgcctcgactcaactacaagaacttcgctccgcatggctattcatgcggctttttgttggaggcgtattaggcttcgttgttgggctgtacttcattggagcactacaagagacaccagcagtctttgcaaagatatgggctctatccttcgttgtgggttatgccgctccgaagatttgggtcgttcaggagcgaaacctcctcagccgtattgatagctccctggacaaacctgaaaaggcttctactggtgtacctgactagcgaagtgctttatctgatacagcggggacaggctcatagccgaggccaaatgctccggcgataggtgcgcataccgcatggtcatcgtgatcgaggagtggccgaggatccgctgtagggtcaggatgtcccctccccccatcatgtagtggctggcgaaggtatggcggagaatgtgggtcatctggcccggcgtctggaacccgcaacgctgataggcgcagcggaacgcggcacggcaggacatgaacaggcggccagatccaggcatgcccaccttgaatatcaacctctccaactcgtccgggatcggcactgatcggctctgccgattcttggtccggtgatagtgcaccttgccgccatgcacagcgccccgtgtcaggctttccgcctcttcccagcgggctcccgtggcgagacacaacagcgcgaccggataggtatggttgttcgtgctggccttgcactcttccaacaatcgagcgacctgatccagggacagaaacgtcagttcgacctgatccgtcttgatttgccggaccttgcccagcgggttttccttgtgccaggagcccaggcgaatcagttcagagaagaccgccgacaagtagcgttgctcgtgattgaccgtctcaggcttcacctcggtcaagcgacgttgccggtagcgtgcccacgccaacgaatcgaactcgaatgccagagggttccctagccgcttcgccagcgcctcgcagcgcgccaagcgttgcttgccgtccttcaaggtgcagccatggaggtcataccagaccttcaccagatcggagagacggtcatccagcggtcggcccgtctcgcccttcacggcaaaaaaatcctgctcatagcgaatcgcggcagacttggtggcgaagcctttcttgcgaatcctgcgcccggaacgaccattctcatagaagtcagccgtccacgtcttgccgtccttgcgtaccgtcatatcgcatatcccttgcgcagatagcgatcacacatgagcttgtgtatatgcctttccagatcgcgacgagtccaacccttggcgagatagtggtcttcgataacgtgccagaactccaatttgcgggcggactcaatagccttttttgccgggacacgctcccgcgcgatcaggctcacgaactggccgaggaacatctcgcagttgcgcccgctaaagcccttggcggtcttgtaatagcgccgatactcggtgcgctcgatcagcggatcgcactcgacctggacgcgggcgtcctggctgatcaggctccagaaggcgtcatacatgccctcccgggagagcacacggaatgcctcgcaggcatagttccacagcccctgtagatgcgggcaaaggccctcgtaggtgcggcagccgatgacctctcccgaggccatacgtgagccttcggagaactgctggacgatggagtggtgatagcgaaactcgatccgccacaccgtttccagggggttataggccgggtcgccatcgccgaacggatccccgttcagggtcgcccacacgctttcccaatagtcgagcttgtcggtggcccgagcctggagggtcttgttatagatcgacagttgcaggccgttggccgagccgaacatgtacgtctcgccacgcccgtagaccgaggcgttgccgtcgaactcgatccgctcgatcccactgatttgccgtacccgacgcgagcgacaatgcatgcggtccaccagatcgcgaggcggtttccagccctgcacgtccaaggcgatatgcacagcggcttggttggtttcgcagtgactcagcacggcagcggccaaatcatccagcacgccctggaggatgcgcggatcggcgccatcgagggcgtgaggcgatacctcgatcttgaggtgcgagccaatggtgtcgaccttgatgttgtgattcttgattagcaagatcagacccatttcagcgttctgcaggcggtactgatagccggagtcgcgaccgatacggcccttggaccactcgtagccggcgaactcgaccacatccaccgagaggtcaaacagcgccatgacttccggccggagtttgccgttgtacaactgccgcacggtgtccacgccacaccgcaggatccgcacgcctgacaggtcggtgaactgtccattgagcgggtccatgaaaagcatccccttcggggacttgtggaaatccccgttttcttcgaggaccagtcgggttggatggatcggagtcttcatgttctttacccgttaatgaggttctatggggttgctgatcgggggttatctgacgtgttacaggggcgtcggccgcgccttcggcctatcgctcatgccttgcgctcccggccggcggcgcggcccgcccctcatggcggcacccctaccgccgctagcgccgtcatcaccgtccaccagtgatgcagcgcccagcccatagccaccggaacgaggaattcccaatcgatcatttctgcctccagggccgcgaggcgtattcggaatcggggacgatggtcagcggcaccttgtcaggttcgcgggcgcccactgccgatgacggcaggttgagcaacggcggcacgccagcgaccgccaccggccggaccgaagagccggcacaggtgacggtcccctcccattccccgtagagcagttccgccacgcactcgccgcgtggcttgatcgcgtagccggatcccacgagttgccaactggtaagttccaggtgccggccggcagggtcatccagggcgaacatgtagatatcgcccttcgacggcatgtaggcgtgggcgaggatcgaaatccgccgatcggcgaagggatgggcgttcagatcaacaggcgcagcagtaggcccatcaggtacaagcccaggaggaagaaagctattcgcagcaggacgcgctggagcagccacagcagcaggcgcagtagcggtcgaaagaggcttaggagtaggcgcggaagctgccggatcaggcttagcaccaataacccgcattggccccatatagctaacaaagccaatagtgccggccagcaatgccagtagaagaaccagcttaggcgaccggaagaggctcttgcccgccttggtgtcctgggtcttgccggtggccgtggactggtagagggcgaaggtctgctttcggatccgcttgtactcgatgatggtgccatcggcgggcggacggttgagttgggcgtcatgctgggcctccttgtagcggccgggaatgccgatcaccgcgaggttggaatgcttgtaggccatctcgcaggtcatgcggatatcgtcgcggatgtaggagatgttcggcgtggtgaggacgatgtcccagttgaaatgccggtgccgggtccaggcgtcgagccagcccatggggcggtcggccgcgtgggccgcttccggtccgccggggtagtcgaagcgctcgaggtctttttcccgccaggacttgggaaacagcagttgggtttcgtcgaagatcaggaaggccccgcggggcgcccactgaaaccacgtgcgcatcttttcgaggtcttccagcgactccagatcgaggttgatgatttccgccgtgttgggcaggtccgggaagacctgataggcccgctccagggtgaagccgcgcacgttggtgatgatcacccgcccgtctttcagcgcgggcacggcgtcatcttggatcgcgccggaggtcttgtaggagccattggggccgtggtggatcttgatcgacacggatcacctcccaatgaacggcacgaagcgcatgcagaagcgcgtcgccgccgcgaccatgatgatgttcagcgcctgcggcacgccgaagaaggccagccccgccgcaatcggacccggcagcgcggcgtacatgctgcggatcatctgcggcacgccgaggctgtcgatcagttcgcgggcggcggtgtagctgacatcgatcagcaggatcagggtctggagcgcggcgtacatcgacgccttggtggcgaccaccaggccgtcgcgcacgaagtcataaatgccttgggcgaagaagtcccagatccactggaagaaggcgatgatctgatcgagaaaaccggagagccattccatagggtcagtccctcagcagtatgaaagcggcgatcagcgcggccatcagcagcagcgccacacgcaggttggagagctggtcggcgtagtcggcgacgcagagggagtaggatcggccccaaatggtcacgtactcgcagggaagctggccgccgccttccgccaggttgaggtcgaacgcgcccttcatctgatcgacgttggcccggaccttgtccttgagttctttcttggcctgctcgaccttctgttcccaggtggcgatggcgtcatcccaagtgccgggcttgggttccttgagttcgccgccggggccggcaggaccgggggagcagtcctgtttcgccgggtcgcagttgccgccatcgccgccatcgccgccaccggttccgccgccgctgccgtcgcctcccccgcttccatcgccgccgccctccccattgccgccgctcccatcggagccaccggtgccgccgtcgccacccccgttgtcattgccgccgccgttgtcgcccccgccatcgccgccaccggtgttaccgccatcaccaccatcaccgccatcgccccccggctcagtcggatccgtgggcgtcttgacgcaagtcgtcccggaccagctatagccgggaggacagccagggtcattcgggtcggacggcggttcgtcgggattggtcggcggggtgtcgttcaacgagggaccggtcatgccgggattgccggagtcagcggcgcaggcactaccgtccgtcatcaacacgtagttgcagaagccttggttgtcgctgccgggatagcgatagcaactggtggtcttcgaggtggtcggcaggtactggcatccattcttgcagccagtgggcggcgagctattcacgaagtttctgccgcccgacacgaagatgttcgagggcggtgaactgaacagatccgtcagccctttgatgcagttgttttccggcggcgtttcacacactcccgtttgcgcgttatacgtggagccctcagcacaaccggtgcccttgcgcacgacggaaatagtgaaattcggctcaatacgattcccgttgaaataacgaaacaccgtgcacacatagttggtcgagcccctcatctcccgcgaatcgatcaccatttcaaccgcgggatattgagccttatacattcccagcccgacctcacaagccgcactaggactggtaaaccggtcaggagcagtcgggccgtttaattgccagtaataaggctccgcgtaggcactccagctacacaacaccagcaacacggcgcagacctgacgcaccagggcgaaccaacgcgcacgcttttcaatcctcatgacacttccctcaagcaacaaaaagccccctgccggaaactccggagggggcttccgcctcggtctgttcggttagaagaattcgccggtccggtacccggtgatgaaggcgccggcgaagaacgcccccaaccacaccgaccagagcacccgttacgccttgcgcaacatgctgtagaccagaccggccacggccagaatcaccagggccccgacgatgtagccgccgatgctggacatatcgcccttgccctcggtgatcgcggcttccaccgcgctggtgtcgatcaccccggcgaaggccggcagcgaagtcgcggcagtgacggaaccggcgatgcacaggttgcggaacgaggcgaccgggctgaacttggcgatgcgttgcttcattgctttcatggtgtttcctctctacttggctttacgaagaagtgacgcgacccagccaatcaaaagccccgtcacgaacgatcccaggacgccagcggcaccgatgccgaaggcttccggggagaaaccaccgttgaccaggatgtccacgtatccagcggcctcgggcggaatcaggtaggcctgctgccatgcgagttcgcgacacgccatgaagccctcgggagtcgaggtccacgcggtacacacctgcacagcgacaacgcctgacatagcgatcagtcctcaaacagccagggaggccgctaggccgtcgatccagccccaggcgtagccggtggccagacctaccgcgaacagcgagagatagcggagcatcgcggcctcctacggcttacgccttggcgtccggggacttgtcttgtttgtcctggccctgcggctgctgggccgggcgcggggtttgggcctgcacttgcgggcgggccggggcttcggcggtcggcgccatcggcttgccgcccacggccagcagatccacaaggacttgggtattggtgatccggccgaaacggtcttgggtcgggcggaccacgctggcgaacttgcagagcaccggctggccttcgaagacgatggcgtctagcagggtcggctcgatgttgtattcgctgatctcgaagcccttggcgttgccacgggcaccttccgggatcggggcgatggactggaccgaggcgtagatttccccggtcttggtcgaggtataggtgtcggtcttggtgacccacagttcgacgacgccgccttgggttgcaaacatgttcatcggtgtttctccttcaattcgcctttttcggcgtgagttgtcccgctgctgcaaattcggctgtttcgccttcattcagcggtgttgggtgaaagtgatttgtcgggcgatcctttcgggccgggctctattcgctagcgaaccaagccaaccacgggtgttcgtttcggcccattcaggtaacgatccctatcgcaacgtcgtctccgacggccaaggggaacccttccccttggaacccgcagagcaacaccaagggctctgcccttgtcatcccgctcttgccgccgagggctcgggagcgcggggcggagaagctgccccacactccccagcggaggctgtttcaggggggaggcgttcaagggtgcgctacgcccgtgcttccgttcgccggaacggtgaagctgttccgacgagccgggagcgcggcccttgaccggatcggccacggtgcgaatggcttggatcaggcagagcaggagcagcgctttcagggtcttagcgagcatgggtcagccctccagttggaatgcttcgcgcacgggcacaaagggcgtgggtttcccgctgtcgtacacaacgtgccagtacttcggcggacgccgggacgggtcgtgtttcgcgcagaaggaacggggacggcagagccagcggccatcttccagatagggcagcccagggggccggcagtccggacacggcgacgggctgtgcaatgggatagcctgccttgcggaccagcacacagagcaggcgcagtccggggcgtgggtttgacgtaggtagtagggactggcggtcatggttcatgccctcaccccacggatgcggtaagcctggcgggcgcgttcgcgggtcaggccgaaggagcggcgagcttcttcttcagtcgggaagacagccaccaactcttcgacccagcgttggcattccacgcgggaaatgccctgatggacgcgatgccagcggcgttgccgggtcgggccgtggaatgtgcacatctctacgaggaacttagtcaccgtcgtaatccccctggcagaagatcgacttgccccggtcgaggtcacggcggatgcgatgcaggttcaccacgcggcgacggccaatcttggcagtcgggatcgtcttggtttccacccagccccgcaccacgtcttccgtgatgtcttccaggcccagcatctgcgcgaagaccgcctgcgagcagaacggcgcggtgcggaagtccgtgaccttttccacagcacccgtgacggtgaaccccactattccagactcttccatggttttgccctataatgaaaatcacgcttactgagtaatttttactaagtagagcaaccttacactcagattgttactaagtacaatctactaagtagaatttttaggcatgataaaagaccgccttataaccttgtttaacaaggagcggacgagtgtctggtttgaaaagcagaccgggattgatcgctatcggtggggtaatgtccgaaacgggaaagccagaatcaccgacgccgaaatcgaggcggtgatagagatttttccgcagtacgcgctttggctggtgaccggcaaggttgctcccgaaagcgggcaaaccagccctgaatatgacgaagctaatcgaaacttgaaggaacaagtcgcgggatcgcaataactctagaagctgctagacgttggtacgcccgtaaagttagcaccaagaacagatagagccgtaaatcttttaaaagccataactataaagccagcattactgcacaaggaagaagcaatgataaaagtagcactatttgatctagacaatactcttgcccataccgaaagcctcgaagaaattcgcaacctagggcaatatgagaaactaacccctgaaagactaaataagattagaccctaccctaagaccataaatctcataaaaaaactacatgaaaaaggagttaaaataggagtagtcacaaatgctggaagaaactacgcaattccagttttaaaacatttagacatcccccacattgatgttactgtaacatattcagatgtaggggcagcaggtatgaagccctcccctaatggtatactactagcgctagaaaaattaggcatcgagcctagccaagatgtcatctatattggtgacgactatgtagacatagtcgcagcttatagagcaggcgttaaaccagttattccttcatggggcccaagaaagccagtatcacaaatgccggcagttgtactaagcactgaatatcttttagacgaaatagatgacacagaacaattgcagtttgtagcagataggtcagcggaaaaccagagctttaacttccctcgaaaaaggctttactttgccccgctagatcttgccaccaacgtagtcacactaagggaagatttaaaaattatttgccttggtagatactacagccaaaaaagccctataacagcaagacttcacgatcagcaccaactctcaaaggatattttcgaaaaggagttagatcaaaacttcaaggctccagaatactgggtagacttgctagcccactgcattgaaaacattcccagctatatactacaaaacgggaatacatttgacattttcaccataatcccctcaaaaaaagaaaaaaataaacgactagaaaacctattacaaaggaccagaaaaaaaagtcagagcccttcgctattccttgaagatgtctttgagttttcagcgggagcccctagcctcaagacactatctagagatggtcgcctagcggcggtaacgcagagcctacacctcacgcacaactacgatttgcgaggtaaaaccgtcttactcttcgatgatgttatgactacaggctctacttttacgcgtgcatttgagctattaaatgaagcaggcgcaaaacttatcgtaggcctcattctagccaaaaatgtcagtatcgcagaagaagacaaagactgccccaactgcggacgagcaatgcgtatccaaaagaacaaaacaacaaacgaacgtttttggggatgcactggctaccacgacaagcaatcaaaatgcacctatgcagaacctctagaaattaagaagtgcccaaaatgtggacgttccatgcatatgaaaacaaatcgctacaaccagcagaaattcatagcctgctcaggctataatcaaagccccaagtgcaactattctgagaatgtataacggatgtcagtttctcttgaaacggaaaagatgttagctattagcgccctgcctggagtagggactatgactttattgacactcttgaaccttagcgagttccctgagctaagtacaaaagaactaatctcttacatcccattccttaaaaaaagagcctctccagaaagtctaaaaaaagcattagacttctcaaagaaaaacatagatgaagctctcaaaagggggcacaccatagtttctatatttgacaaaaaataccccaacagtttaaagagaattcctgatgcaccaccaattcttttctgcgcaggcgacatatcgttcctgcaagataagtgtctcgcagtaattggaacacgagaacctaccgaacacggaaaattaattacaaaaaaaattacaagctggtttacagaaaacaactggaacatagttagtgggcttgctctaggcatagactcactagcccatgaagtgtgtttaaactccacagcaaaaacagcagctgtgttagcccacggattagagaaaatatatccagcaacaaatagaaagctggcagaaagtataatcgagaaaaatggagcgcttatatcagagtacccttatttctctgccacttttaaggcaaatttcgtacaaagagaccggatccaggcggctctatccgctgctgtaatattaattcaatcagatgtaacagggggaagccttcacgcatcaaaatcagcacttaaatacggtagatatctagttgttgccgggcagtcagaaacagacataaaaaacagtgaacccaaaataaaaggcaatatgaagctgctatatggaaacacacatgaagtctatgaaatatttaaagacaaattaatcgacacagctagaatcctgaagcttttcaccaaggaaaactatcaagaaattgaagatgaaataaataagaacagctggtggaactaatcctccaccagcgcacaacaaataggagcaaacttcatatcgctcgctttgagttggtaacaaagctcgtattggaaagaggagacttataatagtcctcatccaagaaccttagaagcttcttcaaatccggcttattatccggaacaacaataacttccgtaccattactcgccaatgtaacgagcggtatattaaactctaacgcaactgccttcatatcattaattggaacactctgcaaaattccactttgctgtataagagatatctttctcctcacccaagaatcagatatttctaacatacgcgcaatatcgccaacctgcacattagcttgctgcgagaaatctcttacatcctcatcagtcgcgactttataatactcacttagatcaaaaatctgacgagcagcatgaaaactaaaaaactttaatttacccccctccaaaatagccgaaagtttatgatcaaccgttagacctatcccttcgatttttttatatacattagtggaatgaaatatcgaaagcccatttgttgatatcactttgcgtctatcgaaattctgcaaaagaatcttaacaacgccgtttggctgcgcgtacccggtaaaaagagactttatttcgccaaaaaactcttcagtgggatcgacctcctctacccctaatggagcaataattgcagattgcaaatcatcgatatcatcatatccatcgacaaacaacacttctcctatatccggcttatactttccatcaaactcaacctcttcctctgcatcctcaaaagccgcttcctgaatctttatataactagtcaactcacgctgaacaatgtttgaaagagaaaagcgtgctatacgcttcgcaggattgctagtcaatgcaaaaagatttaacattccgcttactccaatagcattccagaagaaattctcttaacaagctttatacttttcgggcttaatatattccttctcgatatcaaaatataaaccaccccctcctctgactcgaccttataaaacctgtacttaaatatatacattagcggatgagatggaatatttgaaataagccacgctataaatacacacacaacaaataacaagaaaaaataaaaccaacctatctcagcaaattttgctacgactggtattagatatccgaccacgaatactattaaaaaataatccgccgactctattttcttcgcgttaaaagcaagcgattcagcctcttgcacaaggcataatattatcaagaacggcaaaatactcccgattaaagaaaccaaaaccaattgaataacgactatatctaacacccctgactcataccatctaactccgccaacgactaacaacgtcggcgacagtgctgaaacaaacaaaactgtcttaagccaatttctcatctcatcaccatagaccaagcccatcctcacaaaattttttctcacggcgtgttatattttcataaaatctgaacatctccatattaatagaaactccaccctcaaccagcttaatacttagctctttggaaatacaatatctcataactcgaagattgcacgaagaatatcggcacttcgaaaactcttaaacctttaacgacaggactttcaatacgcactgagcgaaaaattaggcactgcgagattttaatagcaggctccagaaaactcttaaagccattaactgaagtttttcttcaacgagcaaggacaccaagaaactaccaacaagaaaacggagcaatgacaagcactacagaaataaagaacaagtgcagaaagcccaaattttcggacgatattctctctgacgcgagctacgcatccactcgtgacaacccaatcccatgggccctcccagcagcacattttctatagcacatgggcacaggcgaggttagcgcgataggttatagccgtaaatagtctaaggtgtctacataagacgaattaccagaaataacagggtgaaatgaggccttaacacctattgaaacgcccggactcccaggcttcggggtagcacggggcgcctctcatgcgattcataatgctgatgtcccaggttcaagtcccggtgtagccaccatatttttcaaggggttagcgcaagctaacccctttttgttttggtcggcagactacaaaccgactacaaaccgtctacgccccctttaccgatttacggttcgcatgaaaaagccccgcatctgcggggctctacgatcaacgtcaccgctatccgtgagcaagcagcggctcaatctcatgttcgatctgcttgccattcgccgcataagcagttgctaacgaatactcactctggagattcatccagaactgagcggacgtatcaaagtaacgccccagacgaatcgccatatctgcggagataccacgctgctcacgaacgatatcgttcattgtcggagcggagactttcaaagcgcgtgctagagcagctggagagatatcaaactccatcagaaactcatcgcgcaatatttccccaggatggatggggcgcataccattggtagccatggtccacctcctcagtggtaatcaactatttcgacttcttcgggacccgcatccgtccagacgaaacagacacgccactggtcattgatcctgatgctatgttggcccgcccgctttccctgcaacggctccaaccggtttccaggtggagagcgcaggtctcgaagctccgtagccgcatgaagcattgcgagcttacgcgtagcgactgtgaggatcgctccccaccgcctcgaaagacccgtctcaaaaagctgacgagtctcgtcgcagcgaaaggtcagaatcattcattaacccttaacgttaagcgttaacttcactacagattaccacagatcctcatgtggtcaatttgtagccagactgagtaatcggagaaaagcgcatcgccgattccaagtgctccggcgacagatgtgcataccgcatcatcatcgaggaatgcccgaggatccgctgtagggccacgccatgcgcagcgccccgtgtcaggcatttcatcttgctttggatgccaggcatgcctcattgaaacagttcgaatcatttgataatcattatcgatttgtttagctttgccgcccatcaaaacaacagcaactcggaaatctcctcatgccccgctccatccctttgcgcccggctcccctggcgctttccctgtccctcttcgcttcgttttccgctcctgcgctggctgccgatccggtggagcagcagatggtggtgatcggctcgcgcgcgccgaccagcatcagcgagttgcccggcacggtctgggtgatcgagcgcgagcaactggaccagcagacccaggccggcgtgccgctgaaggaggcgttgggacaattgatcccgggcctggatatcggctcccagggtcgtaccaacaacggccagaacctgcgcggacgcagcgtactggtgatgatcgacggggtgtcgctgaacagttcacggggcatcagccggcagttcgactccatcgacccattcaacatcgagcgcatcgaggtgatgtccggcgccagcgcggtgtacggcggcggcgccaccggcgggatcatcaacatcgtgaccaagaagggcgtcggcggcgacactcgcttcaacaccgagctgggcgcccgcagcggcttccagagccatgaggaccacgacctgcgcgcggcgcagtcgatcagcggcggcaacgacctgttcaacggccgcctggccatcgcctaccagaagaacggcgcggcctacgacggcagtggcgaccaggtactgacggacatcacccagaccgacctgcagtacaacaggtcggtggacctgatgggcagccttggcttcactttcgccaatggccacagcctcgatctcggcctgcagtactacgactccggctacgacggcgaccgcggcctcgatcttgggcgcaacttcgacgccctgcgcggacgggcaccctattcgatcaagggcggcgtcgacctcgaccgcgagccggagagcaagcgccatcagttcaacgccacctaccacgcgccggaagtgctgggtcacgacctctacctgcaggcctactaccgcaacgagaagatggccttcaatcccttccctaccatccgctacagcaatagcggcgcgatcaactacggcacctcctactactcggcctcgcagcaggacaccgactactacgggatgaaactggccctggtgaagacctgggagcgcgccagcctgacctacggggtggacctggaccgggaaaaattcacgtccgaccagatgctcttcaacctgccgctcgccgccgccagcggcgggctggtagccagtgaacaggccaaactgggccgctacccggacatcgataccgacagccgcgccttcttcctccagggcagttggaaggccaccgacgacctgaccctgagcgccggcgtgcggcgccagtcgatgagcaccgacgtcagcgacttcgttgcggcgaaccagcagatcctcatcgccaacggcctcggcaagaccgccgacgcggttccgggcgggagcaaggactacgacgtcaacctggtcaacgtcggcgccatctacaagctgaacctgcaacaacaggtctgggccaactacagcgaaggcttcgagctgccggatccggccaagtactacggtttcggacgctacggcgcagccgacggcaatggccactacccgctgttgcagggggtcagcgtgaacgactcgccgctggacgggatcaagaccaagcaggtcgagctgggctggcggcacaccgacggtgccctggatacccaggtggcggcgttctattcctggtcggacaagagcatcaagtacgactcgaagaccctggcggtgctgcagcaggacaccaagaagcgcaactacggcctggagggccaggctacctactggctggacgatcactggcaggtcggcgtcaacggcctggccatccgctcccaggagaaggtcgacggccgctggctgaagcaggacgtgacctcggccagcccgtccaaggccggcgccttcgtcggctggaaggacgaccagcgcagcctgcgcctgcagggcgtgcgcaccttcaacctgaacgacgagccgggcaacaagatcgacggctacgcgctgttcgacctgctcggcacccaggcgctgccggtgggcaccctcaccgcgggcatccagaacctgctggacaaggactacaccacggtctggggacaacgcgcgcaggtctactacggcgggctcgcaccagcgggactgttcgactacaagggacgggggcggacctacagcctgacgtatagcgtggagttctgaagccgtcctcgacagttcccctgtccctccagggagaggggaactcgtgggaaagagcttccgcctctctcagcagcaaccgcccagcggactcaagcgatactgcggcggcaactggtcgaggccgctgacggtgacgttgaggttcttccacaggccatccttgatcccgtagatgcagccatgcacggacagtgactggccgcggtgccaggcgttctggacgatgctggtgtggctgacgttggccacctgctggatcacgttgagctcgcagaggcggtcgacgcgctcttcctcggtcggcaactgctccaggtgctcgcggtattcgtaggcgaggtcgcgaatgctgcgcagccagccgtcgatcaggccgagctggtcgttgtgcagggaggcgcgcacgccgccgcagccgtagtggccggtgaccaggatgtgcttgaccttgagcacgtcgacggcgaactggatcaccgacaggcagttgaggtcggtgtgcagcacgacgttggcgacgttgcgatggacgaacaggtcgccgggcagcatgccgacgatttcgttggccggcacccgcgcgtcggagcagccgatccagaggtactcgggggtctgctggcgggccagcttggcgaagaagtccgggtcttcctgcttgatcgcttcggcccagcggacgttgttctcgaacagttgctgcaagtcgctcatggcatgcccctcgtttgaccggtgcagcaccttacggaaggcgatgcccgtttgacaagcgtcacagcgcggcgtggctacgccaccagcgctgctgcgccagcggctgcatggcgacctgatcatgccaacaggcgtgccaggctgcggcatcctctgccaggcgcggccagtcgggctgttcgaggtcggcgaagagttcccgttccagccaatcgcggccgctgcgcaggagccggcggaaggcgcggtcggtgagcgcgcggcggtgcaccgcctcgaagcgccaccagggggactcctgtaccgcctcgcgcggctggctgagcacggcggcgccggaggccggatcgaaggacagcggctggaacagtcccaggcacggcgccgaagtaccggtggcggccagcaacgggccgtcgtcgcgcaagcgggcgaccagactggcggtggtctgcgaaggccgccagaagctgccggcgtgcatgcatacctggcggttgttgtggcggcggaagtggtccccgcgcgggccatggtggcgcagcgcggcgaacagcgcgtgccagtccggctcaccaggcaggctgtcgaggaagcgctggttgatccgacagcgccggtgcgcgccgccgacccagggtagcaggcgggtgtcgaagacccgcgcgaagtggaagtcgccgcgaccatcccagcagccctggcggcgagcctggtcctcgaggtcgcggctgcacaggtcgaattcgtggccaagggtcagggcgttggagatggcccagcgctcgaccttcttcgccgcccacaggttgccggcggtttccagcacccaggcttcgccggggtcggcgatgaggaagctgttgtcgtagcggatgcgcttgtcgcggtagccggccgggccgccctggccgtaacgctgcaacaacccggtgatcacctctagcgcctcgcgggcgctggcgccgcgctccagtcccaggcgcagcaggtccatgccgagcagcgcggtgccgcgctgacgggtcagcttggtgaacaccgcttcgttgccgatggccacgccgtgctcattgacgcccatttccgcgccccagatccagctcggctggctgatcaccagcgcatgtcgctgggcggtctggggaatgtcgagataggtggtgcgcaagcgcgcttccggatcgttgcgcaccgccggcaggcgcagcagacgctgcggttcggcgggctcgcggtcactgttcttggcgaaccaggtctggccctggtggcgaaggatcagggtgtcgcacatggggggctccagtctgcgcatcctgccaccggccgctgtcgacctgacttcgcactcccgcgaagggttaccgcatgaagggacctgcctgcggtatgcaggcgagaatcggaatgctggtaagggtacggcggtgccagaaggccagccagctactccaagtgatagctagttgccggcagggaagcggagcaagcctcagtcgaacagggtacaggccatgaccagggcgtcttcgcgcccgccgacggcggggtagtagtcgcgacggcggccgatctcgttgaaaccgtagcgttcgtagaggcggtaggcggcctggttggaagcgcgcacttcgaggaagcattcgcgagcctggtggccggccgcctcgcgcatcaggtgttcgagcaggcgcagaccgaggccacgcccctggctttcgggcttcaccgtgatattcagcaggtgcgcctcgtcgaggatgatctggatgacgccatggccgacctgctggctaccctcgaacatcagccagcaatggtagttcttcaggccttcgctgaagatgccacgggtccaggggtggctgaaggcggcatattcgattttcagcacggcatcgaggtccgcctcggtcatcgggcggaaggaaatcgcatcgctcattgaatctcgctcgaccagcgctgacggacacggcgcatggcgcgccacagctcgcccttgagggcgggttcttccatgagggcttccaggcccggcacggcccaggttgcgcccagaccgtccacctgcagttcgcggaacaggctgccctcgtcgccctcgccggcgaagcggatcgccggcaggccgaccagccacaggcagcggctacgctcgctctcctccatgcgcgcggcgacgaagctctggacgaactctagggccgcctgcggcccctggtcgaggttgccgcgcgccagcagcggccagcgtaccggttcgccgatcagccgcgggctgtccggcaggccggcggcgcgcagcaggtcgcgcagcagcaggtaacccggatcacggctggcgaagggttcgccggtgggcagttcgaccagcagggtgcaggagcccgcctgcagcagttgcaaggcgaagcgcggcggcggggcctggaccgccggcggctcggccggggcctcttcgaccggcgcgaccagctcggctttcttcgccgccggggctcccggcttcggcaggctgatcgggatcccccggccttccgcgggcgcggcgggagccacgctcggcgcgctggccggcgcctcggcttgcgggacgcgggcctgcggcgcatcgatcgcggcgcgcgcacgcacaggcaccgccggctcttcccggggcggggtctccagcaactccggccgcgaaggtgcggcgaacggcaacggctggcggggcagccaactggttatctgcatcgcgcccaggaaggcgcggcgacgctgttcttcgatcaaatctcgggcaccggcaattaggcgatgcgcggggacggtttcgtccccggcgttcaggcaggcaatgatagcggttcttcgacctcggcggagcggctttgtcccgccatgcgacggttcgccctcaacgcggggcgacggtgaagatgttgacgttgccctgcagcttgagggtgccgtcgatgcgtgcgctgaccaggttggtctgcaccagcccgggatcggtaccgcgcgccttgttggcgccagcgatggtgaagcgcaggtcctggaagctggtgtccttcaggccgacgcgcagcaccgggcggttgaaggcggcgccgtcgccgccgaagccgtccttgatggtcaccacgtccagggtgacttcgtcgaagctgaacttgccgctgatatcgtcgatcaccaggtagttgttgccgctgccggccggctggatcgccaggcgcgcgccgcaaccgccggcgcagcgcgtctgcgaaggattttcctggagattgagcgaggcgctgatgctgatcccggcctggccgaccacgtcgtccagatcgctatcgcccagcgagcgcaactcggccccggccgaagcgctgaacagcagcgccagcgccgcgaggatgccgatgccgcctgccagtggatgagtctgcttggccatgtgctgcgtacctcgtttcccgccgccacctcagaggttgtgcgacgtcaccttcaggtagttgaagctgagcccggatatctcgttgcggcccatgttgtagccgccggtcggtacctgcccgtagcctggccgggtaccgccgatgttgaggttctcgatcaccaggctggtgcgcggcgcattggcgtagaagtcagcggcgttggccagggtcagcttgggcagttcgaaagtgaagttgccgtcggcggtgaccgagaacagcaacggctgcgacttcccgtagccaagcgcgacgctggcataggcgttggtcaggtagacggtgcgcgcggcctgctcggcggcgctgacgcaactgggcgagccagcaccgcaggacatgatctcgaaagtcttggcgtagaggttcaggcgcatctcgccaaccagttggctgcgcgcgttggcgccccagaagcgcaggtaggaaccgtccatcgccagttcggagaagtccaggttgagcacatcggtgcgcgtggaagtgacgccgaagtcgaagcggatgccagcgtcgaccttttcgctggcccggctcgagcagttgctgccggcaccggcgtaaccagcgatgcacggctggccgccggcgccgctcaccaggctggggaaggccagttcgatcacgtccgcggtgtccggcaaggtgctgaccacccgcccgtcgtcgagctgggtggtcagcaccgaacccttggccagattcagcttgaacgggaaattgagacggccgagagtcaccggcgccagggtgctgcccttgttgctgccagtggcggcgacgtacagctcctttaccgtaatcggcacgttctgcccggtggcggtgttggtcacgccattgatcgcgatggtggccttgttgccgtcgaccatggcgctgtcgaggacgaagccgatgccggcaccctgcacgtccgacagttgctcgtcgtcgagcgctgtcatctcggcatgggcgaagggggcggccagcagggccgcgagcaggcaggcgcgactcatctcagcagcccttgttcaggccgcccaggcaggtgtcctgccgtggaatgccattgaaggcctgaccgaagtcgaccttgatcggcgccgttccatcggcgttgcgcgacatgttgaggaaggcaccggccagcgcggcgaccagcttggagggatcctgctggtcgcgccactggacgttctggctctgcatcgagatgaagaagcctttcgacgagtcgatgaagttctgcgcgttgttcggatccacggtgccgatcgggaacgactggtactgggccaggttgaagcatgtctgggcgcccatcagcttgcagtcgttggaggtcaggaagggcagcaggacgttcaccaggctgccgatgatggtgctgtcgtgcatgtccagggccgtgccgttcttcaggccgatcatggcagcgcggatcgggtcggggttgccggagctgttcaccagctctgcctgggcggtgtactgagagctgccggtgagagtgatggcggtcttcgccgccaggcagtcgagggccagcaggccgcaggaaatgctgcctcccagttggctgccggtgccgtacaggtccaccggcacgttgccggtgagggttttgatatcgcccgagaggtagcccttggcttcgccgaaaccgatacggatgccgaccatcttgctgccgtcgtaggcgaactcgatgtagggattgctgatgaggaacgggttgatcgcgccggtggtgtcgttgaccgtgcccagggcgaagttgtcgatggcgatgtcggcactgccggcaagctcgccgctgcggttgtactggcccaactgcagcttcttcatgttcagttgggtctcgatgtcggcgccgaagttgatgcgggtgaagttcagtccgttggcggcgtcggtggtgaggttgatgaaggcctggccgaccacgtcggaaagctggtcgtcgtccagcgactccatcctcgcctgggcggtggcagccagcagaccggcgccgcagaacagcgcgcaacgcagcaggaagggcagacgacgggacatgggctcacctcttgttcttctcgtggccgacggcagagacactgcgacctgtagtcactatagaaagccccgggcgaatcggggccgacccatagtcgagaaaaaccggcgaacgacgcggtcgccgcgctcgctgcagcggatgagcggtcgctcggccaggatggatgttacccatcgtcacacgggggtaacgtcagcctttcactgctggcggaacaggccgatcagatggtcggcgatggcgcccttgatggcgttgaggctgagcagggagtgtgcgctgaggcgggcggggttgatccggtgcaggtgtagcgagggcatgcgcgcttcgtactcgcgcaggtcgcccttgaccaggatcggcaggaacacgtcgtcgtgagcctggtaacgctggatcagcagtttcaacccttcctggaacggcaattccttcgacgccaccaggcggtgctcgccgggaatcttcaggtagagcccgcgatagcccatggtctcgcccggcaggatatggatcccggtgggctccaccgcggccagcgggatatcgtggaaggtgtcgtgccaggcctgctcgctgggcaggatggtgatgccgccatggtcgctctcgggaatcacgaagctgtagttgctgtagagcttctcgacataggccgagtagatgcacaggcggttctcgaaacgtttgaggaaggcgatcgcctcgctgcggttggtgatggcatccaggtcccaggcaaggtcaccctggttctgcagttcggcccagcgggcctcggcgtaggcggcgtcgttcaagagtcggcattcatttggaatagacaggccaggggacttcagcagaaagcgtgccagcccctggaagccccattccccggaccaggcggggcaggaaagtccttacgcagtcataaactgccgcttttcgacacttcggtgatagccagatgccatccaccgataccgggcccgtacctgcgccgcagacgtgtcgacggcctgcatcgcactcatcggcggcgtctgcgtcgcccgcgcctttgcagtacaatcggcgctttttccacggaccggccctcccgatgatcgacccccgacgcgtactgcgtgcgcttgccgaacactgggccctgctcgagcctctctgcgagcgcttcgatgccggcaccctgagcctggcggaactgcgcagccagttgaacacccagttaccggaaagcaacccggcggaaatcaccgccctgctcgaccagtggatccgcctggatatcctggtcccggtggccaagagccccaaccgtttcgagctgaacgcgcagatccacgacttcctcgcctacctgcgccacgagcatcgccttggtctgtgcctggagatcgaggcctacctgcgccatctggagcgcctcgccgggtacatccaggatgccttcgagacccgcgacagccaggacctggcgcgccagctgcgactgctcgacatgcgcgtgcgcgatgtactgaagaagctcggcaatgacgagcaggcactgatcggcgtggccgagcgggccaagaccagcgaccggcagattcccctggcgcagcgctacgcggaggtcctggcgacctgggacgagtacgtcgagccgatgatccaactggtcagcgccgacggcgccttcgagcagggcgtgcggcgggtcgaacaggtcctgctgcgcctgctcggcgaacagcagcgcctcggccacctggtcgacgacgacctggtgctgcgcacccacgcgcgcatcctcgagatgcagaccaacgcccagctgaccttgcgccgcgcccgcgaattattgctgccgctgcgcgaggaagcgcgccggcacaacgcggtgacccgtggcgccgccctggcgctggcggcgatccggcgcaagggcctggatgccgtgccgcaggcggcgatgccgctgttcacccggccgcagagcaccttcctcggcaccgcctcgcaggtcgagagctacgtcttcgccctcgcccgcttcgagccgaagccggcgcagttccccaagtccagcggcacgcgcaagagcaacgggccgacgcgaccaccgcggaccgcgcgggaaatgatcgagcgctgccaggcggcgctgccgctgccggacctcatgcaatggctgctggcccaggaaccggacggcgccaccgacgagttgctctactggttctcccggctgtcgcgcgacgcgcgcttccagcgcgaacgcctgcaacgccgcgagtacgaaaccaccgaacattgcgtcagcctctgctccttcgccctgaaccccgccgccaaggacaagggccaggccagggacgcagacaccctttccgcgagcgaaacccatgcatcttgatctctccgaactgacccagctcgcgccgatcttccgcgagctgttcaagggctaccacatcagccaccgcgaccccgagctgtacacccagctgtcctcgcaccaggaccagtaccgcggcctgttccgcgccatgggcttcgagctggtctgcgatacccgcggcttctactacttcgtcccggagcaggtcggcgcccaggtgaacaagaccgcccaacgcctggcgctgttcaccttcatcctcgtcgaacacctcgcagaccagggccgcgacccgctgtccgtgctggacggcggcagcatcggccgcgaagagctgccgccgctgctggagaaataccgcgacctgttcctccaggccgaggtgcagacccaggaagaactggaagagaaggtcatgcgccgcctgacccagctcggcttcgcctccgaggacagcggcgtgtaccgcttcatgccgccgatgcaccgtttcctcgacgtctgcctgtcggtgcagcaggaccgcaacctgtccgccagcctgcacgccgacctgccgttgcagacgccggtgctggtcgatgacggcgagatcgaaccgctgatggccagcgacgaagaattgtccgaagagagcgaggaagacgccctcgcccgcgccatcgccgaagaacacgcgcaacaggaggctgacgcatgagccagacccgctacggcatccgccgcttcgccctgctcaataccgccggctacagcctgggtatcttcccgctggaaaacccgctgtcgatctacggcgccaacaacctgggcaagagcgcctcgatcaacgccctgcagttcccgatccttgcccgcctgtcggacatgagcttcggcaagtacagcatggagcagtcgcggcgcttctacttcgcctcggacaccagctacatcctcctcgaactgatgctgccccacggtccgcacgtgatcggcgtggccgggcgcggcccgggcggcggcttcggccaccagttcttcgcctacgccggcgagctgagcctggaccactaccagaagaacggtacctgcctgcgccagcgcgagctgttcgccaacctcgagcgcgaaggcatcaaggcctacgaggtgaagccggaagagctgcgccgcctgctggtcggcgggcacacgtcgatcccgctcgacctgaccatgatcccgctgcgctccaccagcgagcagagcctgaagaccttccgctcgctgttcatcaacctgctgcacatgcgcgagatcaccgcggccaagctcaagcagctgttcctcgacgccttcgagcacagcctgcgctcgggtaatgtcgactacatcgccgcctgcgaggaggccttccgcgacgtgcggcggatggagcaggactaccaggcgctggtcgccgccggcccgctggtggaagccctggccaacggcgtgacccagcgcgacgtactgcgcggcaagatgcaccgcctttcaccgctgctcgacagcctgctcggcacctggcacgactacgccggggcgcgccgcgaggaactgctgatccagcacgagcaataccgcgccgagcaggacggcctgcagaacgaacagcgtggcggcacccaggagctgatgcgcctggagcgcgagatcgccggcatccagcgctggctcggcgagctgtcggtgctcaagacccgcttcgccctggtcgacgacgccaaggtcctcgaacaacagctgctcgccgccaaggatgcccacgacgaactggccggcgccctggcccattcgcggcagttctccagcgaagacctggaagagcgcctgcgcgacctggaaaaacgcctgaagaacgtccgccagcagctcgaacacgccgacaacaacagctacgcacgcctgcgcgaggagttcagccagcaggacgtggaacgcctgatgcgtctgttcaacggcgcgctgttcagcctgccgctcggcgagaacggggtgaacctggatgacggcgacgtctgggtgaagagcgtcgaagccatcctcgaccacttcaagggcgagcatttcgaggctcccggactgagcatcgacctgtcgcacatcgaaccgccggcgttgcaggccctggccgaccgcgccgccctgcgcgaccagaaggagcgcctggagaaggagctgaagcagctcaagacccagcagagcgtcgccgccgaccgcgccgcgagcaaggcccaggcggagaagctgtaccaggacgtgctggatgcgcagaaggccctggaagacttccgccgcacccagacgctgaccgccgaggagcccgagaagctcgccgaactggcccagctggaggcgtcccaggacgaactcaagcgctccagcgacgccttcgccgagcgcgtccagcagctctccgcgcgcctgcaactggtggcccggcaactgggcgacctggaggccaaggagcgcaccctggaagatgccctgcgccgccgccagctactgccggccgacctgcccttcggcacaccgttcatggagccggtggacgactcgctggacaacctgctgccgctgctcaacgactaccaggacacctggcaggcgctgcagcgcatcgacggacagatcgaggcgctgtacgcccaggtgcgcctgaagggcgtcgccaagttcgatagcgaagacgacaccgagcgccgcctgaagctgttgatcaacgcctacgcgcatcgccaggacgaggccctgacgctggccaaggcgcgccgcgcggcggtcaccgacatcgcccggaccctgcgcaacatccgcagcgactacgacaacctggaacaccagttggccctgttcaaccgcgagatcaacaagcgccaggtttccaacctgcagagcttccgcatcgtcctcgcgccgaacaaggatgcgctcaagcacatcgaccagatcatccacagcgccggccagtacgaggaaggcgagaacctctcggtgttcgacctgacccagagcgccgagcaggacgcgaagaacgaggaggccaaggaatacctggcccgcctggtcgccgccaaccacaaccagctgggcctgaaggacctgttcgaactggccttcgagatcaccaaggtcaacggccagccgatcatgcacaccgacatcgacggcgccgcctccaacggcaccaccatgaccatcaaggcgctgaccaacatgtacctgttgctgcacctgatggaccgcgagcaggccgggcgcgtgcgcctgccctactacctggacgaagcggcggacatcgacgagcgcaaccaggccgcgctgctggagaccagcctgcaactgggcttcgtgccgatcctggcgagcgtgaagccgcaggtttccgcacacgtggcgatcgacctggaaggcggtagcggcccgaacggcatctatatcgacgaagccgactggaaatacatccgtcgccgggatgccgccgccagcggcgaaacccgcgtagccagcgaaccggaggaagccggcgaaccggcgtgaagcgtctgccacggccctgcctaacagggccgtggacttttccgataggcccgaagctcccacgaagatataattggttacattcgcatttgtaacccacggggagaatccatgcctgttcgacttctcaaccgtttccgccacgccgccctggcgtgcctgctcggttcgctttccctcaatgcggcggccgatcccgtcacccttaccctctacaatggccagcacgccgccaccggtatcgccatcgccaaggccttccaggacaagaccggcatccaggtgaagatccgcaagggcggcgatggccagctcgccagccagatcaccgaggaaggcgcacgctcgccggccgacgtgctctacaccgaggaatcgccaccgttgatccgcctggccagcgccggcctgctggccaagctggagccagagacccgggccctggtcgagccggagcacgccggcggcaacggcgactggatcggcatcaccgcccgcacccgggtactggcctacaacccgaagaagatcgacgagaaggatctgccgaagagcctgatggatctttccgatccgtcctggtccggccgtttcggcttcgtgcccaccagtggcgccttcctcgaacaggtcgccgcagtgatcaagctcaagggccaggaggaagccgaggattggctgaccggcctgaaggccttcggctcgatctacaccaacaacgtcaccgccatgaaagccgtggagaacggcgaggtcgacatggcgctgatcaacaactactactggtacaccctgaagaaggaaaagggcgagttgaactcgcgcctgcactacttcggcaaccaggacccgggcgcgctggtcaccgtctccggcgccgcggtgctcaagtccagcaagcaccccagggaagcccagcagttcgtcgccttcatgctcagcgaggaaggccagaaggcgatcctcagccagtccgccgagtacccgatgcgcaaggggatgcaggccgatccggcgctgaagccgttcgccgaactggacccaccgaaactgaccccggccgatctgggtgaggccagcgaggccctcagcctcgaacgcgacgttggcctgaattgatcggcgccgcctccacgcccgtgcgcctgcgcacgggctcgcgccggcgaacgccattctggctgctcctgccggtcctgctcctcgccctgctggccagcctgccgctgctctacgtcgcggccaaggcctgggacgccggctggcacagcgcctggcaactgctctggcgcccctacgtattccgcttgctgggcaacaccctgtggctgatgttcggcgtgaccctgctcagcgccctgctcggcctggccctggcctggtgcgtggagcgcagcgacctgccggcgcggcgcttctggaacgtggtgctgtgcctgccgttcgccatccccgccttcgtcagcagtttcacctgggtttcgctgagcccgatgtacgaaggcctcggcggcgccatcctggtcatgaccatgtccaagtatccgctggtctacctgccggtagcggcgaccctgcgcggcatcgatccttccctggaggagtcggcgcggatgctcggtctgtcgcggcgccaggtgttcctgcgggtcaccctgccgctgctgcgcccgaccctggccgccaccgggctactggtggcgctgcacatgctggtggagttcggcgcgctgtcgatcctgcgctaccagaccttcaccacagccatctaccaggagttcgaactggagttcagcaacgccaccgcggcgatgctctcctcggtactcctggcactgtgcttcctgctgctctggctggagttgcgcatgcgcggccgcggccgcctggtacgcaccggccagggcagcgcgcggcgggccgaacgggtccgcctggggcttggcaagtggccgatccaggcgctgctggcgacgctggtgctggtcggtaccggtatccccctggtgatgctcggttattggctgtacgaaggctcctcggccagcttcccgctgatggaaatcgcctcgaccctgctttcctccctgtcgctggccttcggcggggccctgctcagttgcctgctggcgctgccggtaagcatcctggtggtgcgctaccccggcgccctggcgcgctggacccagcgcctgccgtacctgctgcaagcgttaccgggactggtgatcgcactctcgctggtgtacttctcgctgcactacctgccagccacctaccagaccaccggcttgctgctggtcgcctatgccctgctgttcatgccgctgacccaggcaccgatccgcgtggccctggaaaaggcctcgccgcagttggaggaagccgcccgcactctcggccagacgcccttgatggccttcctgcggatcaccctgccgatcatctcgccggccatcggcgccggcttcgtgctggtgttcctcgacaccatgaaggaactgaccgccaccctggtgctaggtcccaccgggctgtcgaccctggccacctcggtctgggtgcacaccgccaacctggagtacgctgccgccgcaccctacgccgcgctgctgatcctgatctccggcttgccggtgtacctgctgaccacccgggcgcatctcagcactcactgacacccacttcccagcaggcaggcatgaacgaaaacgccgcttacccaggtaagcggcgtttctttttgccggtccgacaatcagcggcgggcggtttccttcagaggaatcttcggcgcccactccaaccattcgtcattggccgaatcgaacagggcgaaggtctgccccggcttggcgggctcgcccatctgcgcattgttcggggtggcgaaggcaatgccgccctccatcagcgcctccatcgactcggtgcgtagcgacagacccttgaacaggctggcgtcgacgccgaagccgctggcattccagaaacggctgccggtacgcaccagcggtacgtagcgcggttcgatgaggatgctgatcagcacccggtcggcctgttcgcccaaggccaggtcgacgaccttgcccaccgggatctgccggtaggtcaccaggttgcccggcttgatcgagcccttgcgcggcgcactgagggtcagccgcaggccgctttcccgacccagcaggttgggcgcttcggcgagagtctggaagcgtgcctggcgctcgcccggcgtgctcgacggcagcgcctcgatataggggccgctgaccagggttccgaggttctcggtacgcagcaggccgagcgccggacgcaccacccagaagcgggttccgctgcgggcgacgcgctcgccggcggaagtcaggcgggccttcatcagtatcccggagaggtccgggttcagctcgacgctttcgatcttgccgatgtccaggcccttgaagcggatcggcgtgccttcgcgcaggccgtcggcattgtcgatgctcagctggatttccacgccacgggccatcgccgcctcctcgctgtcgaagagggtgaagcgacgcaccttggtcacggtcggcgccttcggatcgagggtgtcgaaggaaatcccgccggtgatcagggtctgtagcgactcgctcttcacctgcacgccgctgaggttgccggtcagggtgatcccgctggagttccagaagcgcgtcgaggtattcaccaggtgcgcgtactccggctcgatgtgcacacccaccaccactcgctggcggtcgcgcgacagctggtagctctgcacgctgccgacgcggacctggcggtagaggatcggcgcgccgatgtcgatcgagccgagcttgtcgctggtcagcaccaggtgcaggccgggcgcgtcggtgttcagcggcggcgctttcgggcggatggtgaactcgcgactcggcgcgccgctcttggcgaagcgcacgtcgatatagttacctttcaccagggcctcgaggccggtgatgccggccagggagatgcttggcttgacggtccagaactcggtgccttccagcagcatgtcctcgacccgcggatccatcgccaggtcggcagtggcgctgctgtagtccttgcccatgtcgatcgacttgaccaggccgacctgcacgccgttgaacatcaccggggtgcgccccggatcgataccactgacgtcgttcatcttcagcttcacgcgcagaccggcctgggccgcgtcgtagtcgtcgtacaggcggaacggcttgctcggatcggtcggcgggctgtcggtgcggttctccggggtagagaaggcgataccgccggcgaccagggtcagcagcgactcgctgtgcaccttgaagccggacaggccgccggaaatggaaatgccgctggcgttccagaatcgcgtgtgcttgcgcaccaggtccgcgtaggccggctcgatgtgcaccttgatctcgatggtcctctggtcatcgcccagctggaagctcttcacctggccgacctggatctgccggtagaacaccgggctgccctgctccagggagcccaggcgatcggccttgagggtcaggtgcaggccgggcagcttgtcggaaaggggtggcggctccttcaacgcggtgaagtagcgttcttccttctcgcccttcaccggatcgaccgcgatgtagacgccggagaccagggtttccaggccggtgacgccagccagggaaacccgcggcttgaccagccagaagcgggtgtccttgctcagatattcctgggcttccttcttgatctcgatggtcgcgaccacgcccttgatgtccttgctgacatgcaggtcggtcaccttgcccaccgagatgcccttgtacagcacctcggtcttgttggcctggatcccgtcgccgctctcgaagcgaacctggatgtccacgccagcctggtcgaaggcacgccacgccagccaggcaccgatggccagggccaccagcggcagcacccagatcgccgaccagttcgaggtcttgtgtttcttcggacttggcagatcactcattctcgtcatccagattggtgttgtcccagatcagccgggggtcgaacgtcacggcggcgagcatggtgagcaccaccacgctggcgaaggcggcggcgccgaggttggcctcgatgctcgccaggttgccgaaattcaccagcgccacgaggatggcgatgacgaagatatcgagcatcgaccagcgcccgatccattcgatgaagcgatacatcaggatacgctggcgggccgacatcggctggtgccgctgtaccgaatagagcagcagggcgatgcccaccagcttgaaagtaggaaccaggatactggcgacgaacaccaccatggcgatggggaacatgtcggcatgcaccagttcgaccacgccctccatgatggtggcgggcattccgctgccgaagaggttgaccgtcatgatcggcaacaggttggcgggtatgtagagaatcgccgcggtgatcagcaacgcccaggtgcgcgtgaggctgtttgggcgccgggcgtgcagcaccgcaccgcagcggctgcaacgcggatgctcgtccccgtcggcgcgattcaactggtggcactcgccgcacaccaggattccggcatcaagcgcgcgcatcgtcgtcctcgccgcccagcgcttcccatacctggtgcggcgacatggtgacctccagccagacctgggtgaacagcagcgccacgaaacaggccaggccgatgcccaggctgaggtcggccatatcgatcagcttgacgatggaaaccaggatacccatgaggtagacctcgagcatcccccactcgcgcagatggtgatagccgcggtagagcagcatgccgatgtgacgggcgatgccgaaacgcacgctgatcatcaccagcaactggcagagcaacttgaccaacgggatcaccatgctgcacaggaataccaggatggcgacgccctgcatgccactgtcgtaaagaccgagcactcccgtccagaccgtatcgctgcgggtctggccgagcaggctgagattcatgatcggcaggaaattggctgggatatagagaaatagcgccgtcagaaccagcgcgaagcaacggcgtttccattgatggcgatgcgcggccaactcgaaaccgcagcgcggacaattggctttctcgcccggtcccaggggttcccggcgcatcaacagatcacactcatggcaagcaaccagttcttccaggggaagatcctgcaggccacggacatcggtatcggacatgaatgagctcggctggatttgtcggctattgtagacgagcgcacagtgcaaatcgcgtctcccatgccctcggaagtacgccgcccggcagctctcgaagtttttcgattaccgtccgcagcgctgctggcttgccacttttccgcgcgcaaaagcaaaacccctggtcatcgctgaccaggggttttgggataggagcttgacgatgacctactctcacatggggagaccccacactaccatcggcgatgcgtcgtttcacttctgagttcgggaagggatcaggtggttccaacgctctatgatcgtcaagcaattcggttggatatccgttcgcttgggcttacgtctatccggattcaggtatgtgatttcaaggtgtttgcggttcatgcgaactttcggttcgtcgacttcaccttacaacacacaatcgtcagattgtttgggtgttatatggtcaagcctcacgggcaattagtactggttagctcaacgcctcacaacgcttacacacccagcctatcaacgtcgtagtcttcgacggcccttcaggggaatcaagttcccagtgagatctcatcttgaggcaagtttcccgcttagatgctttcagcggttatcttttccgaacatagctacccggcaatgccactggcgtgacaaccggaacaccagaggttcgtccactccggtcctctcgtactaggagcagcccctctcaaatctcaaacgtccacggcagatagggaccgaactgtctcacgacgttctaaacccagctcgcgtaccactttaaatggcgaacagccatacccttgggaccggcttcagccccaggatgtgatgagccgacatcgaggtgccaaacaccgccgtcgatatgaactcttgggcggtatcagcctgttatccccggagtaccttttatccgttgagcgatggcccttccatacagaaccaccggatcactaagacctactttcgtacctgctcgacgtgtctgtctcgcagtcaagcgcgcttttgcctttatactctgcgaccgatttccgaccggtctgagcgcaccttcgtactcctccgttactctttaggaggagaccgccccagtcaaactgcccaccatacactgtcctcgatccggattacggaccagagttagaacctcaagcatgccagggtggtatttcaaggatggctccacgcgaactggcgtccacgcttcaaagcctcccacctatcctacacaagcaggctcaaagtccagtgcaaagctacagtaaaggttcacggggtctttccgtctagccgcggatacactgcatcttcacagcgatttcaatttcactgagtctcgggtggagacagcgccgccatcgttacgccattcgtgcaggtcggaacttacccgacaaggaatttcgctaccttaggaccgttatagttacggccgccgtttaccggggcttcgatcaagagcttcgcttgcgctaaccccatcaattaaccttccggcaccgggcaggcgtcacaccctatacgtccactttcgtgtttgcagagtgctgtgtttttaataaacagtcgcagcggcctggtatcttcgaccagccagagcttacggagtaaatccttcaccctagccggcgcaccttctcccgaagttacggtgccattttgcctagttccttcacccgagttctctcaagcgccttggtattctctacccgaccacctgtgtcggtttggggtacggttcctggttacctgaagcttagaagcttttcttggaagcatggcatcaaccacttcgtcatctaaaagacgactcgtcatcagctctcggccttgaaaccccggatttacctaagatttcagcctaccaccttaaacttggacaaccaacgccaagctggcctagccttctccgtccctccatcgcagtaaccagaagtacaggaatattaacctgtttcccatcgactacgcttttcagcctcgccttaggaaccgactaaccctgcgtcgattaacgttgcgcaggaacccttggtctttcggcgtgggtgtttttcacacccattgtcgttactcatgtcagcattcgcacttctgatacctccagcaagcttctcaactcaccttcacaggcttacagaacgctcctctaccgcgtcacttacgtgacacccgcagcttcggtgtgtggtttgagccccgttacatcttccgcgcaggccgactcgactagtgagctattacgctttctttaaaggatggctgcttctaagccaacctcctagctgtctaagccttcccacatcgtttaccacttaaccacaactttgggaccttagctggcggtctgggttgtttcccttttcacgacggacgttagcacccgccgtgtgtctcccatgctcggcacttctgggtattcggagtttgcatcggtttggtaagtcgggatgaccccctagccgaaacagtgctctaccccccagagtgatacatgaggcgctacctaaatagctttcgaggagaaccagctatctccgagcttgattagcctttcactccgatccacaagtcatcccctaccttttcaacgggagtgggttcggtcctccagtcagtgttacctaaccttcaacctgctcatggatagatcgcccggtttcgggtctatacccagcgactaaacgccctattaagactcgctttcgctacgcctaccctatacggttaagcttgccactgaatataagtcgctgacccattatacaaaaggtacgcagtcacctaacaagtaggctcccactgcttgtacgcatacggtttcaggttctatttcactcccctctccggggttcttttcgcctttccctcacggtactggttcactatcggtcagtcagtagtatttagccttggaggatggtccccccatgttcagacaaagtttctcgtgctccgtcctactcgatttcacttcaaagatcctttcgcgtacggggctatcacccactatggccgcactttccagagcgttccgctaaaatcaatgaagcttaagggctaatccccgttcgctcgccactactaagggaatctcggttgatttcttttcctcagggtacttagatgtttcagttcccctggttcgcctcttgcacctatggattcagtacaagatacctaggttatcctaggtgggttcccccattcagagatctccggatcaaagtctgtttgccgactccccgaagcttttcgcaggctaccacgtctttcatcgcctctgactgccaaggcatccaccgtatgcgcttcttcacttgaccatataaccccaagcaatctggttatactgtgaagacgacattcgccgaaaattcgcgcttgaactcgcaaattttaccttgacttgaatgatcaccagtgaaagagatcattcagtcttacttctatcacatacccgaatttttaaagaacagttctggtgcaaagaccagaaatcaatgttcattcacgaacattcatttctgagctttcgacgattgttttagatggtggagccaaggaggatcgaactcctgacctcctgcgtgcaaagcaggcgctctcccagctgagctatggccccgtatcggatcacgcagcacaccaacaattggtgggtctgggcagattcgaactgccgacctcacccttatcaggggtgcgctctaaccaactgagctacagacccaatcgtctaaccagtgaatcaagcaattcgtgtgggagcttatgaagaagctgagatcttcgattaaggaggtgatccagccgcaggttcccctacggctaccttgttacgacttcaccccagtcatgaatcactccgtggtaaccgtcccccttgcggttagactagctacttctggagcaacccactcccatggtgtgacgggcggtgtgtacaaggcccgggaacgtattcaccgtgacattctgattcacgattactagcgattccgacttcacgcagtcgagttgcagactgcgatccggactacgatcggttttatgggattagctccacctcgcggcttggcaaccctttgtaccgaccattgtagcacgtgtgtagccctggccgtaagggccatgatgacttgacgtcatccccaccttcctccggtttgtcaccggcagtctccttagagtgcccacccgaggtgctggtaactaaggacaagggttgcgctcgttacgggacttaacccaacatctcacgacacgagctgacgacagccatgcagcacctgtgtctgagttcccgaaggcaccaatccatctctggaaagttctcagcatgtcaaggccaggtaaggttcttcgcgttgcttcgaattaaaccacatgctccaccgcttgtgcgggcccccgtcaattcatttgagttttaaccttgcggccgtactccccaggcggtcgacttatcgcgttagctgcgccactaagatctcaaggatcccaacggctagtcgacatcgtttacggcgtggactaccagggtatctaatcctgtttgctccccacgctttcgcacctcagtgtcagtatcagtccaggtggtcgccttcgccactggtgttccttcctatatctacgcatttcaccgctacacaggaaattccaccaccctctaccgtactctagctcagtagttttggatgcagttcccaggttgagcccggggatttcacatccaacttgctgaaccacctacgcgcgctttacgcccagtaattccgattaacgcttgcacccttcgtattaccgcggctgctggcacgaagttagccggtgcttattctgttggtaacgtcaaaacagcaaggtattaacttactgcccttcctcccaacttaaagtgctttacaatccgaagaccttcttcacacacgcggcatggctggatcaggctttcgcccattgtccaatattccccactgctgcctcccgtaggagtctggaccgtgtctcagttccagtgtgactgatcatcctctcagaccagttacggatcgtcgccttggtaggcctttaccccaccaactagctaatccgacctaggctcatctgatagcgtgaggtccgaagatcccccactttctccctcaggacgtatgcggtattagcgcccgtttccggacgttatcccccactaccaggcagattcctaggcattactcacccgtccgccgctgaatccaggagcaagctcccttcatccgctcgacttgcatgtgttaggcctgccgccagcgttcaatctgagccatgatcaaactcttcagttcaatactgcttgggttttgagaaaaccctaaacttggctcagcaatcgcattctcttaaaaagagataaaactctcgaattcacgagtgttacttgcgttgctgataatcttgcgatcaccagtcttacatcacaagcacccacacgaattgcttgattcgacttgttaaagagcagttggtcaaggctttcgtctcaaccgaggccgcgcattctacagcaacctctcgttccgtcaagcgttattttcgaaaattttcttttctactcaaccgcttgcgccgaccttcaaaccatcttccgatcagcgggaggcgcattctacagcgttcaaactcgctgtcaagcacctcgatgaagcttcgtttcgagcccctttcgggaccgaaccgctgcggcgaacaacctgccggagcgcttcaccacccccgggagagaatccgtaaatacttgattttcaagcatttactcttcgtcgtcgccgggagtggtgcgcattatagggagatagaaactggcgtcaacacttatttgaaacttttattacgaaacaccgtgacgagttcgaagcctgggcaggcggcgagcgatcgagggtagccgcagcagcatgagcgacgcaccaaccacagcgtacagggtccactcctccaggtctgcccgcaccacccagagcatgtgcaacaagccgagcccaagggtcaggtagaccaggcgatgcagcttcttccagcggctaccgagcttgcgcatggcgaagcggttggaagtgatcgccaacaggaacaggcagacgaatccaagcattcccacgatgatgtagggacgcttgctcaactcgatgcccaactgcccccagtccaaccccaggatgaacacgcagtaagcgctcaggtgcagcagcacataggtgaagcaccacaaccccaactggcggcgcacggcgatccagcccggccagccgctcagcttctgcagtggcgtcatcgccagggtgagtagcagcaataccaaggcgcccagccccagtcgatcgaccagggtcttgcccgggtcaggtccgagggcaaagatccaggcttggtacaaccaccaggccggtactgccagcgcccccaggaataccgcaaggcgcagataccagtagcgcatcagtagtacttcctcagatccatgccgctataaagggaagcgacctcactcccgtagccattgaacatctgcgtatcccgcacattgggactgaacaacccactgggcaggcgccgctcgcgggcctgggaccaccgcgggtggtcgacctgcggattgacgttggcatagaacccgtactcgttggcggcaatgctttcccaggtggtcttcggctgctcgcggaccagactgatacgcacgatagacttgatgctcttgaagccatacttccacggcaccaccaggcgcaacggcgcgccattctggttgggcaacagccgcccgtacatgcccaccgccagaattgccaggggatgcatcgcctcgtccatgcgcaagccttccatataaggccagtcgatcaccgagaaaccggagcgttggccgaccatctgttccggacgctgcagggtttcgaaacggacgaacttcgcctgcccattgggttcgacccgcttgagcaggtccgccaggggaaagcccagccaagggatcaccatcgaccaggcttccacgcagcgcagccgatagatgcgctcttccagttggtagggtttgacgaaatcctcgagggcataggtacccggcttgccgacctcgccgtcgatcaccaccgaccagggctcggtcttcagggccgaggcgttttccgccgggtcgcccttgttcggcccgaactcgtagaaattgttgtagtgggtggcgtccttgaatggcgtgatcgcctccccctggacattcaccgcctgccagcgggtctgcggtagcttttcggcgaaccagcccggcgccggtaccgactcgacgccggcatagcgctgctcgtcggcaaagcccaggcgtggcaggccgctggccagcgccaatccggcgagggaagcgccgagcaggcgccgacgggacaggtagagggtttcggacgtgacttccgactcggaacagtcggaacgggagggaatcttgatcagcatgacgggctccgcaatgaccagctttgtgccagtagactacggagcccgttggaaattacatcagctcggctgcttccggcgacgcagttgcagcaggtattgcacaggaccggaggccgcgtaggcaaggaacagcaacaggaggatgcgcggcgggtcggtaaagaccacggcgaaggccagcaccacgataaggatcgccacgaacggcacccggccgcgcaggtcgagatccttgaagctgtggtacttgatgttgctgaccatcagcacaccagcggcggcgaccagcagggcgacgaggaaggcaaccttggcgccctgtatctcgaaatcgctgaacgcccataccgtgcccgccaccagcgccgcggcggccggactggccaggccgatgaaatagcgcttatcggccttgccgacctgggtgttgaaacgagccagacgcagggctgcgcccgcaacgtagatgaaggcgaccatccagccgaccttgccgaggctgccaagcgcccattcgaaggcgaccagcgccggcgccacaccgaaggcgaccatgtccgacagcgagtcgtactcggcgccgaaggcgctctgggtgttggtcaggcgagccacgcggccgtccagtccatcgaggaccatggccacgaagatagcgatggcggcgttggcgaactggccgctcatgccattgatgatggcgtagaagccggaaaacagggccgccgtggtgaacaggttgggcagcaggtagataccgcggtgacgaaccttccgcccttcggcgtcgtgcccttcttctatatgttcgtccatgggcagcaggctttcttcgtcggaggccttgttcggctcctcgggacgttcactcatggacaattccttgggaactgatggggtacgaatatgccgacagcacttctgactaggaagacaactccgccggcccaggctttataccagatcgccaggcaagaacgaaaaaacgcggccggggccgcgtttcttcgtctgtcgccggagccgcttagttcttgctcttgtcgacgatcttgttggctgcgatccacggcatcatcgcgcgcagcttctcgccgatctgctcgatcgggtgagcggcgttgttgcggcggtaggcagtcatcgacgggtagttggccgcaccttcggtaatgaacatcttcgcgtactcgccgtcctggatgcgcttcagggcgttgcgcatggcagcacgggactcggcgttgatcacctccggaccggttacgtactcaccgtattcggcattgttggagatggagtagttcatgttggcgatgccgccttcgtacatcaggtcgacgatcagcttcagctcgtgcaggcactcgaagtaggccatttccggcgcgtaaccggcttcgaccagggtttcgaaaccggccttgaccagctcgacgcaaccaccgcagagaacggcctgctcaccgaacaggtcggtttcggtctcgtccttgaaggtggtttcgatgataccggtacgaccgccgccgacgccgcaggcgtaggacagggcgacgttcttggcgttgccggaagcgtcctggtagatggcgatcaggtcagggatgccaccgcccttgacgaactcggaacgcacggtgtgacccggtgccttcggcgcgatcatgatcacgtcgaggtcggcgcgcgggacgacctggttgtagtggatggagaagccgtgagcgaaggccagggtggcgcccttcttcaggttcggctcgatctcttccttgtacaggcggccctggaactcgtccggggtgaggatcatgaccacgtcggctgcggcgacggcggtcttcacgtcggcaaccttcagaccgtgcgcttcggccttggccacggtggcggagccgctacgcaggcccacggtgacgtcgacgccggagtccttcaggttgcaggcatgggcgtggccctgggagccgtagccgatgatggcaactttcttgccctggatgatcgagaggtcacaatctttatcgtagaaaacgcgcatgggaattccccttcagtaaggcctcgcgggcctgctttcagttcagatgctcagagtcttgtcgccacgggcgatgccggtgacgccactgcggaccacttccaggatcgacgcggtgccgatggcctggatgaagctgtccagtttgtcgctggtacccgccagttgcacggtatagacgctactggtgacgtcgacgatctgcccacggaagatatcggtggtgcgcttgacctcggcgcgctgggcgcccgtggccttgaccttcaccagcatcagctcgcgctcgatatgagcactttccgacaggtccaccagcttgaccacttcgatcagcttgttgaggttcttggtgatctgctcgatcacctcatcgtgccccacggtggtcagcgtcagacgcgacagggtcgggtcctcggtcggcgccacggtcaggctttcgatgttgtagttgcgttgggagaacaggccgaccacgcgggacaatgcgcctggctcgttttccagcagcagggaaatgatgtgtcgcatgatcaggtacgctccgtcttgctcagccacatgtcgcgcatcgcgccgtcacggatctgcatcggatagacgtgttcgctggcgtccacctggatgtcgaggaagaccaggcgattcttcatggcgaacgcctcctccatcttcggcttcagatccttcaggtcggtgatgcgcatgccgacatgcccgtaggcttcggcaagcttgacgaagtccggcagggattccatgtaggaatgcgaataacggctgttgtactgcatgtcctgccactggcggaccatgcccagggcaccattgttcaggttgacgatcttcaccggcaggtcgtactgcaggcaggtagacagttcctggatattcatctggatactgccctcgccggtcacgcaggcgacatcgtcgtccgggaagttgagcttgatgcccatcgccgccgggaagccgaagcccatggtgccgagaccgccggagttgatccagcgattgggcttgttgaacttgtagtactgcgaggcgaacatctggtgctggccgacatcggaggtgatgaaggcatcgccatgggtaacctcgtagagcgtctcgatgacggtctgcggcttgatgatgctgccgtcgcccttgtcgtacgggaacaacccacggttaccacgccactcgtcgatctgcttccaccaggcagcctgggcatcctggttcggggtctcgccgatttccctgacgatcgcgaccatttcggtgagaacgctgtccaccgggccgacgatcgggatgtcggccttgatggtcttggaaatcgacgccggatcgatgtcgatgtggatgatcttggcgttcgggcagaacttcgccgcgccgttgatgacccggtcgtcgaaacgcgctccgaccgcgaggatcacgtcgctgtgatgcatcgccaggttggcggtgaagctgccgtgcatcccgagcatgccgaggaactggcggtccgcgccgggatacccgccgaggcccatcagggtgttggtcaccggcaggttgagcatctgcgccagctcggtcagcggcgccgcggcattgcccatgatcacgccgccgccggaatagaccaccgggcgcttggcggccaggagcatctcggcggccttgcggatctgtcccgagtgaccgcgaacggccgggctgtacgaacgcaacttgaccttcttcggataggaatattcgaacttctgcgtcgggtcgcccatgtccttcggaatatccacgaccaccggccccggacgaccggactgcgccaggtagaaggccttcttgatcacctcgggaatttccgagggatgcttgatgatgaagctgtgcttcacgatcggccgggagatcccgaccatgtcggtttcctggaacgcgtcggtaccgaccatgttgctcggcacctggcccgacaggatcaccatcgggatggagtccatgtacgcggtggcgataccggtgatggcgttggtcgcgcccgggccggaagtcaccagcacgacaccgggtttgccggtggcgcgggcgtagccgtcggccatatgggtagccgcctgttcgtggcgcaccaggatgtgggtcacgtcgtgctccttgaagagcgcgtcgtagatatgcaggagggcaccacccgggtacccgtagatgtacttaacgccttcgtcgcgcaacgagcggacgaccatttcagcgccagataaaagctccacgttttcacctctagaacgctatacggccacccaggggcgggcgaccgaaattcggttggctgcccggcagagcatgggtgacggtagtcaccggctacgtcaactgccgattgagcaaacttggaagggcgcctggtgttacggagctcttccacccagcgcgaggtaacgcgaagcagggtgtaactttcggcgcgggtaggcacctcatggtctgccggagaggggactgggttgcagacggcccgctacagcgagcttggattcttcgcattcgtcgaacgcaagtcaagctttattctgaaaattatcaaaaaaaattccaaggaagctgccatacccttctataaaaaagctgatcaatgaccaaaaacagattttatggctagaaaattccgatttagagcaaacttttccaaaatgcccatgattcccgcgaggacttgccacggcgaggccgtctccggcggcggttgtgatgccgtgcagcatgccgcgctggcggatttggttatagttagccgcagttagcgcattccaaggactccgcatgcgacgcatgatcctcccggccagcttgttgctcgccctctcctctttcgccatggccgccccgatctacaaatgggtcgacgccgagggcgtcacccacttcggcgcacaaccgccgcaaggtgcacaagcgaccacggtgaatacccagaccgccccgccgccggacaacttccccctgcccccctcgaccccggcaccgaccatccagcagaaaccggccgatcccgagcagaaggcgatcgacgacaaggtgaagcagcaagtggcgaaggaagaggccgagcgcaagcagttctgcgaagagacccgcaacaacctcgcgcaactgaagaacaacccgcgcgtaagggtcgacgaaggcaagggcgaactccgtcgcctcggcgaggaagaacgccaggagcgaatcgccaaggccgaaaaggcgatccaggagaattgccgctgaggcgaacacagccccgtcccgcagcatggggctgacccggctctccgccttgcttgaagcaaagaaaaacccggcctgtagccgggtttttctttactgccgaagcttcatgacggcccgccgatcagccggtcgaactcgccaagcgccgccagcaggccggcgacttcctcgccacgctgcgcataggccacctcggccatggccaggatacccgaggcttgcggcaaggcgctgtcgctttcgagaatcagcttcatccgtggcaggaagatccattgcagccattgctcgagcgccagcgtatccacgcagaacggctcggggctggccagcgcttccggggcggggctgctttcgctccaccagccgagggcacgcaactcacgctcgatcagcaacaactggtcggccagcgcatagacccgtcgatccatcaggagctgaccttggccttctgccgggccagcgcagcgccggcggagtctccctgcttctcccgagcctgggcgatcagttcccagagcccggcctgcaaggccggccggccattggcgtagctcaagccacggcgcgcgacctgctcggcctgagctgcatcgccctgggccaggcgcacctgggccaggcgatagagcacctgcggctcgcgcggagcgatgcgctgggctcgctcgaggctggcggcggcgctgttcaggtcgccgctgccctgctgttgctgggcggttgtgagcatcgccaggaccggcccgtccaactgctcgtcggccgccaggctgccggccgagccggaggccggaatgccggtgggcgcggaacgactggcgccgctgggcggcatgttgtagctgccacccagcggtggcgtggaggcgctgctgggcggagcctggtactgggtgccggtgccgagcggagcgctgctgatcggcgcggcgccggactgcgccgggaaagtctggatcggtgcggaattggcgccctgcggcaccatcaccaccacaccggagtcgccgccctggggaatgccctgggtggcggcgccttgctgggtacgcggtacctgggtacgggtgatgcggaaaccgccgctttcctggttggacaccggagtaccggaatccaccaccgggatcgccccgtgctgcgggctggcgcagcccgcgagcacggcactgccggcaagcgcggcgaatacgaaaatcttcttcacgtcaggtcctctcggatcaattcagccagccacgtacccagtccatcacctcgccggcggggttctggctcccgcagcctgggccctgggcgggctcgctgccacgaatatagggcatctgtacggcattcgggcaatccgccgccgagccctgcccggtctgcgcgtcgacccaggccatcaccacgttctccggcatcggcatttccagcgattgcggatgcgccttgcgcatgaagctggcccacacctgcaaggcaccggtggcgccggtaagcggcgtcttgccgttgtcgtcgcgaccgagccagaccacagcctggaggtcgccgccgaaaccggagaaccagctatcgcgcgagtcgttgctggtgccggtcttgccggcgagggtcagcgacgacggcaattgactgtacaccgaacgcccggtgccttcgcgcatgacccgctgcatggcgttctgcaccaggtagacggcgcccgagtcgaagcgctgttcgacctggaacggatagcgcttgagcggctggccgtcggcagtgaggacgctgcggatcccccgcaacggcgtgttgaagccgccgctggcgatggtctggtacatggtggcaacctccatcggactgagcgaaccggcgcccagcagcatcgacggataggccggccaatcacggttgatacccagccgggcgacggtctgcagcacgttgggcacaccgacgtcgaggccgagcttggcggtggacaggttgtaggagtttgccaggccctggtacaggaagatcgtgccatgcgagcgccggtcgtagttctgcggtcgccagacctggccgtcctggcctttcaccgcgaagggctcgtcctgcacccaggtggtcagggtgtacttgctcggccgctcgagagcggtcaggtagaccgccggcttgatcagcgaaccgatcggccgcaccgcgtccagggcccggttgaagccggcgaagcgcgggtcgcgactgccgatcagggcctggatctcgccggtttccggattggtcacgaccatcgccgcctcgacctggtcgactcccttgcgcccactgaggcgcttgagcgtttcgttgacggaggtctcggccttttcctgcaggatcggatcgaagctggtgaagatgcgcagcccttcctcggtcaggtcctcgtcgcggtagtcctggcgcaactggcgcttgaccaggtcgaggaaggccggataggagctgtcggccatgctgccctgccgggtaacgccgagcgggcgctgcttggcggcgtcgacttcctgctgggtcgccacgccctgctcggcgagcacgtcgagcaccaggttgcgccgcgccagcgcacgatccgggtaacgccgcgggttgaagtaggacggtcccttgaccatgccgaccagcagcgccacctggtcgagcttgagctcggccagcggctggctgaagaaatactggctggccaggccgaagccatggatcgctcgttgcccatcctggccgaggaacacctcgttgagataggactcgaggatgtcgcgcttgtcgtagtgcagttccagcagcaccgccatcatcgcttcgttgatcttgcggctcagactgcgttcgttgctcaggaagaagttcttcaccaactgctgggtcagggtgctgccgccctggcgcagctggccggccgtggtgttgacccacaccgcccgggccacggatttcagcgacacgccatggtggttccagaagtcgcgatcctcgaccgcgaccagggtgtcgatcaggtaggtcggcacctggtcgagcttgaccaggatgcgatcctcatggtgcgccggatacaagccgccgatcagcagcggctcaaggcgcgccaccgccagttccttgccgttggcctggctcagcccgctgacgtagttgccgttgaagcgcacgcgcacgcgctgggccggttccgcgccctcgtagaactggaagccacgggtattgagttcgaccgcgctggccgccaccgatacggttccagggccgctcacgctgggctcgcgacggtagccgagggcgtcgagttcgcgcaggaagtcttccctgctcagcttcaggccgttgaacagctccagcgggcgggcatagaccttcgccgggatggtccagcgccggccggagaatttctcctgcaccacggcatcgagatagatggcgaagccggcgaggagcaccaggccgacgaggccgagcttgagggcccagccgagccatttgttcaggccgggtgccgggcgtgctttgctgttacgggaacggggggatcggggacgcgtcatggcggcgcattatacgtactttatccacagcggacagacaccgcatcggcggcatccacggtctgcgcggccccggtggataggcgcggcggcagcgcggcgcattcgaccggcgatccggcaaatggttgctatccgccagcgaggtttgcactgtcaccccttcccgccataatgcgggttttcgcatatttcagaggcaaggatatcccgtgagccagaccctgatcgccgccctgcagaacccggccctctacccccacccggtggagcgcttcgaggtcatcgagacgcatatctcctgggtcctgttgaccggtccctacgcctacaagatcaagaagccgatggatttcggctttctcgatttcaccagcctggacaagcgccgtttctattgcaacgaagagctgcgcctgaaccagcgcctcaccgacgatctctacctggaggtcctgccgatcaccggcagcgaagaagcgccgcggatcggcggcgacggcgaggcaatcgaatacctgctgaagatgcgccagttcccgcaggacaacctgctggcggcaatccagggccgcggcgaactgtccaaccagcatatcgacgaactggccgagcagatcgcgcacttccaccagaacactccgaaggtgccgctggagcacccgctgggcaccgccgagtcctgcatggcgccggtgcggcagaatttcgagcaggttcgcccgctgctcaaggacaaggccgacctgcaacagctggatgccctcgaagcctgggcggaaagcagcttcgaacgcctgctgccggtgctccaggagcgcaaggcgaagggcttcatccgcgaatgccacggcgacatccacctaggcaacgccgcgctgatcgacggcagggtagtgctgttcgactgcatcgaattcaacgagccgttccgtttcaccgatgtctgcgccgacttcgccttcctcgcgatggacctggaagatcgcggcctgaagtgccacgctcgacgcttcgtcagcctctatctggaacacaccggcgactaccaggccctggaactgctgaacttctacaaggcctaccgcgccatggtccgcgccaaggtcgcgctgttcagcctcggctaccagaccgatgccgtgcagcgcgcggcgaccctgcgccagtaccgcaactacgccaacctggcggaaacctacagcgccattccctcgcgcttcctggcggtcacccatggtgtctccgcggtcggcaagagccaggtggccatgcgtctggtggaggctctgggcgccgtgcgcctgcgctcggatatcgaacgcaagcgtctgttcggcgagcagccggaacacgacaggggccagttcgccgccggcatctatagcagccaggccagcgaagcgacctatgcgcaccttcaccagttggccgcgaagatcctccaagccggatatccggtggtgatcgacgccgcctacctgaagcagaatcagcgccaggccgcttgccacatcgcggaagaaaccggcgtgccgttcctgatcctcgactgccaggcgcccgaagcggtgatcgccggctggcttgcgcaacgccaggcggaaggcaaggacccgtccgacgcgactctcgacgtgatccgcacccagcaggctacccgcgagccgctgacagcggcggagacggtccagagcaagcgcgtcgacacccacgacgcggccagcctcgacgggctggtcgacggcattcgccagcgcctgcccggtctctgaacgaactgccatgccgcccgcccctccagggcgggcgccgtgccgctgctcttctatactcacggcgagccttctgcacaggacgccgcccatgaactcgccccgtcagctcgactcgccgctctaccaactgctccacgccgaagacatcgaaggcttcaaccgacagaagccggccgacggctggatcgacctggccggcggcgacttccgcggcctcgacctgcgtctgctggatgccgcccgcgtcgacttcagcgatgcctatttccgcggcgccgacctgcgcggcgtggatctgcgcgaggcgcgcctggagggcgccagcctggcccatgcgcagatatccggtacgtatttcccgttgcgcctggcgccggacgagatccgcatgtcggtgaacttcggcacccgcctgcgctacctgccggagccctgagaagcggaaggaccacgccaggccacgttttgccgggaggccgctacacttctggcaggtacccggccggctgaggatcggtcccggaccgcctacgccggatcgtaagggcgaaggccgctcgcgtcggccatctcgctccatcgcgccggccctgtcggctccggaccggttccaggcagttccgcgccatcacgcttctgagcggcatcgcaaggaccgacgatgaacgacgaactgctgaacctgaaaaacctcgggaaaacctcgacccaatggttgcatgccgtgggtatccacagcgccaccgatctgcgtcggctcggctcggtgggagcctatcgcgcggtccgcgcgcgcggcttccgagcctcgaaagtcttgctctatgccatcgaaggcgcactcctcgacgttcactggaacgagctgtccccagaccacaaggccgcactgctcggcgagctggagactttccccgtgcgaaacaagagctagctcacacctgccacgggaagatatttactccccccgggcgcccacctatcgtctcgtggacgttcgtacctcctctcccgaccaggcagctcaaggaaatggccatgtatctactcggcgagcaaccggcttatgccgaccaattgatcaatcgcctgcagggaatccctcaccgcttgctcgaaggcctggcacccagcggccccgccgtggaactggaacgtagcgacgacctggaacgcgagctgcccgccgaccaggtattcctggtggaaagcggcctgctgcatgcgctggtcgacgaactcccactgttctacctccaggaaggcgacctcctcggccttcgacgcggactcgtgctccccgcctgccggcatgccaatgaagaaccgatccgcctgctgccctattcgcgcgatgcgctgctccagcacatccatgctgaccaggagcgtcaggaactgctattgcagtacctgatcggacagactgccctgctcggcgatgcgctggcgcacctgaagcagccggaagtccgcccggccaccggcttccgccacttcgccgcgggcgaggcgctgatccgccagggcgacgatgcggatcatgtgttcatcatcatcgaggggcatgccgaagcgctggtggacggccagaaagtcggcgatgtgcagaaggacgagatcttcggcgccatggccgtgttcactcgcgagaaacgcagcgccacggtggtcgccagcgaaccctgcacggtgatggtgattcccaaggagcagttcctcggccttatgcagaacaacccgcgaatcgcccatagcctgatcgaaggcatggcccggcggatagacctgcttaaccgggaagtgacccagctgcgcctgcgccgcagcgcctgaggcccattccagagggctcgcgactagctagcagaaaagtttggcgaaagcgtttgacatggaaatgagaatcattattatgtcactcaactggtcgcgagatcagccggtaagctgagagacccacgcagtcggactcttcagattatctcctcatcaggctaatcacggtttttgacccggcactttgccgggtctttttttgcctgcgattcggccggagacgaccgttcatcggctggcgatggaatgaatgagaaccggcttgacctgataatgagaatagttattattacatcaactggtcgcgaggccagcaggtaagctgagagaccaagcagtcggactcttcagattatctcctcatcaggctaatcacggtttcgacccggcactttgccgggtctttttttgcccgcgaaaacgtagcgcgatacgcggctccaggcctcgcgcccttccttcaacgtgccttcttcatctccgcgcaatagtccttgtccggctgtgccggcgtgtaccaggcgtagtcggcctcacgcgtcgttaccgcctgcccggcctcgaccagcatcagtacctgcgcgcccttctccgcaccaaggtcgcgcaggtggaccggtacgccgaggtcgcgtcgggcgtggaagctgccggcgacgagcatcgccggcagtggcgcatcgcgaagacgctcggccatgcggcggtcgcgttgctgctggacggcgagcatcgccggcaattgatcgtcgggaagcatgccgcagtgggattcgcgaatctgcgcaagcagcggcaggcgcacgctgtcacgcctggaggccgttccgggaagcggcggacgctccctgtagatgcgcatgatctcgctccgctggaggttcgccgccagcaacggcgcgggttgcgcaaccgcccaggacaccaggggtccgtactgcgtccagtcccaacctttctgccagtccagggcctgctccaggttcgccaccggcttgccggtcccgagttgtacgcggaccgcatccacccgtggttgttggccgggatcgagcatttccagcagcaggctgccctgcgcccgatattcgcccagggcctgcgccagccacagttccacggcatgatgatcgggattgtcgtgcttctcgccgacgatcactcgcggcgcggctgccaggcgtgcgaccagttgctgcgggctcagcgtcacgccgctgcgcaattcgacgattcgtcccgtctgcggatcgtcgcgcccttccgggctctgccaatcaggcagcggcggcagttgggactggcagccgcccagcagcagacagaaagcgaacaggcgaatgcgcatggcgactccttcaacgggcgacgatcagcggatgacctcgctcgggatgacgctggaccaggacctcgaggccgaacaccgcgcgcaacggctcggggcgcaggacttcctcgggcgtaccgagcaggtgcgggcgaccattctgcaacagcagcaggcggtcgcaatagcgcgcggccaggttgagatcgtggaggatcaccagcaccgaggcaccgcggcgggcgaaatcatgcaccgcctgcagggtagtgtgctggtgcagcgggtcgagcgccgaggtcggttcgtcgagcagcagcacctgccccggctcgcccggccacagctgcgccagcacccgcgccaggtgcacgcgctggcgttcgccgccggacagcgccaggtagctgcgcccggccagatggctggcgtcggccgccgccaaggcctcggcgacgatcagcacatcgcgctcgcggccgctggaatggggcagccgaccaaagccgaccaccgcctccaccggaaaggcgaagcccagcgacgaactctgcggcagcaccgccaggcgctgcgcgcgagcgacgcccggccagtcgtcgaggccgcgctcgtcgagcagcaccagcccttcggccggctccagttcgccacagagagcgccaagcaaggtgctcttgccagcgccgttggggccgagtacgccgagcatctcgccaggccgcagctccagctcgaggccttccagtacagtctttccgccacggcggatggacaggttctccacgcgcagcatcaggcccgcccccgcaatagcagataaaggaagaacggcgcgccgatcagtgccgtgacgatgccgatcggcaactccgccggagccagcgccaggcgcgccagcaggtcggcaagcagcaggagaatggcgccggccatcatcgaggccggcagcaacgtccgatgatccggaccggcaaccagacggatcaggtgcggcaccaccaggccgatgaagccgatcatccccgccgccgccactgcggcgccgacgccgagggcagtgcaaagcaccagttcggccttcaatcgctcgacgtcgaagcccaggtgacgggcctcggactcgccgagcagcagtgcgttcagcgcatctgcccggcgcggtagccagcaggccaccagcagcgccaccagcagcagcggccagagtcgtgggtagctggcgccgttcaggctgcccaggttccagaaggtcagggtacgcaaggtggcgtcatcggcgagataggtaaacagtccgatcaccgcgccggacagtgcggtcaaggcgatccctgccagcaacatggtggccacgctggtctggccatcgcggcggccaagccgatagaccagccaggtcacccccaggccgccgccgaaggcgcacagcgacagcaggtaaggcgcgaggaacgccggcaagccgcccagcgaggcgccgaatacgatggccagcgccgcgccgagggccgcgccgctggacaccccgaccagccctggatcggccagcgggttgcggaacaggccctgcatcgccaccccggacagcgccagcaccgcgcccacggccaggccgagcagggtccgcggcaggcggatctggccgaggatcatttccgcctgggccaggcccgttccatcgagcggcagcccggccaggcgcagcgcggcgcgcagggtatcgcccagcggcaggctgacgggaccgagggcgagggacaaccagaggaccaacacgagcgaaatccccagcgcaccgaacagtgcgcggggacgaacaaccgatttcaatgggcggcttccgtactcagcggtttcgcggaaggataaaaggctgcggagagagccgccaggccatccggcaggcgcggaccgaggccgcccaccaggagcgtcgggtccagcaccagcagacgtccgtcacgcgccgcgcgggtcgcggcgagcccggggttctgcttgagcagcgcggcacgcgccgcatcaccttcgaggctgcggtcggcgatcaccaccgcgaccggatcgagcgctgccagggcttccaccgagatcggcttgtaaccctcatgggtagccaggttgcgtgctccggcccggttcaggacccaatcgccgccggtattgcgcccggctaccagcaactgaccgccggcgttgccgatcaccagcaggacgcccggggccggctgactcttctgcgcggccgcgatccagtccgcctggcgccgcagccgctgacgatagtcaagttcggcggcctcggcgcgctggggcacgccgagccagtcgccgagcttcttcaggttgctttccagtgcctccagatccggcttggcggagagggtctcgacccgcacgccggcgccttcgagctgcttgagtaccggcggaggccccatttcctcggtgccgatgaggatatccggacgcaacgccagcacgccctcggcagccagttggcgctggtagccgacgctcggcaactgtttcagcgcctgcggatgctggctggtggtgtccaccccgaccagcttgctctcgccacccagcgccaccacccattcgctcagcgagccgcccgcgctcacccagcgttgcggcagctcggcggcctgggccatgccggtgccgagcaggatgcccagcgccaacccgttgaatagtcgatcgatacgcatgatctctcctcagagcgccttgaaggattcggccagttcgcgccagtcgtcgcgctcgggctcgccgggcttgcgtgcgccgaacagttgcacgatcagttcgccgtcggcgtcgaaggcctcccagctggttacgatgccatcggtgctcggcttgcgcacccgccaaagctcggcgatgccggtggtcttcaggtgcaggttgaattccggatcgagcacgttgaaccagtcgtccagccacttcaggttgcacacaggcccggtatggatctggatgcagtgggcgttgccgacgaacaccatgatcggcaacccgctttcggccgccgcttcgaagagtttcgccaggtcgccattgtccaggcgctcggcccattcgccgccagccaggcgcagcgcctgggtgcgctgcgcgccatgcttcttcagcagggcgtggaaatgatgggtgtccttcagcgcggcccagccttcgcgcaaggcggcggcatcgatctgcgcatcgacgagcgtcgcagccggtgcgcggggttcgcgcagggccagcgcggcatcctgctcggcagcccgcaggcgctcgaccagcggttcccaggcgcggacatcgctggcctcggtaaggaacaccttgtgcaccgccacgccctgctggtcgaacacctggatgctgcgctgggtaccccgcgatgtctcctcggcaatggcgaagacggcgttccaaccccccaggaacaggcgcaggtcgatatccggcgagaccaccaggcccatctgcccattggcagagaccgtcacttcgcgatacggccccttgcgttcgtggacgcaatgctcgttgcgggtcagcgccatgatcggccccagttcgccgagcgccggcagcaaggcggcccagtccggccgcaggcgcacggcatcgatgccgacccggctggcgaccagctcgccttcgctgacctgcaacagcgcggcggcgtcgcgcgcgcgtagctgcggtcgctcggcgcgcaggtcctgccaggcgcggtaaagctcggcaggggaatgggaaaggctgggagtgctgctcatcgacggttcctcgggcatatccggttcggtcgcgctacgcgcaaaaacaggtgaactttgccacaaaacgcatatctgaatccatttgataattatttgcattagcgtttttctggcagtaccttgtgcgcccgacgtccccctggctattcgccaccggcccgacccaaggagtcccacatgccgctctccccgcccttcgccctgcgcccctgcctggccctgctgttgctcagcccttccctggccctggcggggaacgccgtcccgctgaccccgaccaccatcaccgccacccgtaccgagcaggcagtggattcggtgccgagcaccgtcagcgtgcagacccgcgaacaactggaccggcagaacgtcaacaacatcaaggaactggtgcgctacgaaccgggagtctcggtcggcggcgccggccagcgtgccgggatcaccggctacaacatccgcggcatcgacgggaaccgcatccttacgcagatcgacggggtcgaactgcccaacgacttcttcagcggcccctacgcgcagacccaccgcaactacgtcgatccggacatcgtaaagcgcgtggaaatccttcgcggcccggcctcggcgctgtacggcagcaacgccatcggcggcgcggtgagctacttcaccctcgacccgtcggacatcatcaaggacggcaaggacgtcggcgcccggctgaaggccggctacgagtcggccagccactcctggctgacctcggccaccgtcgccggccgcgccgacgacttcgacagtctgctgcattatggctaccgccagggccacgagaccgaatccaacggcggccacggcggcaccgggctctcgcgcagcgaagccaacccggaagacgccgacagctacagcctgctcggcaagctgggctggaactacgccgagggcagccgcttcgggctggtcttcgagaagtacaagagcgacgtcgataccgaccagaagagcgcctatggcggcccgtacgacaagggcaagccggccatcccgccgagcatgctgccgggcggcatgtaccagtggcgcaagggcaacgacaccctgactcgcgagcgctacggcctggagcaccatttcctgctcgacagcccggtcgccgatcgcatccagtggagcctgaactaccagttggcgaagaccgaccaggcgacccgcgagttctactacccgatcacccgcaaggtcctgcgcacccgcgacactacctacaaggaacgcctgtgggtcttcgacagccagttggacaagagcttcgccatcggcgagaccgagcacctgctgagctacgggatcaatctcaagcaccagaaggtcaccggcatgcgcagcggcaccggcaccaacctggacaccggcgcggacagcccgcgcgatgccctggaacgcagcagcgactttcccgatccgacggtgaagacctacgccctgttcgcccaggacagcatcagctggaacgactggaccttcactcccggcctgcgttacgactacacgcgcatggagccgcacatcaccgacgagttcctgcgcaccatgaagcagagccagaacaccgcggtcgacgagtcggacaagaaatggcaccgggtttcgcccaagttcggcgtgacctacgacttcgcccagcactacacctggtacggccaatacgcccagggcttccgcacgcccaccgccaaggcgctgtacggtcgattcgagaacctgcaggcgggctaccacatcgagcctaaccccaacctcaagccggaaaagagccagagcttcgagaccgggttgcgcggcaagttcgacgaaggcagcttcggcgtagcggtgttctacaacaaatatcgcgacttcatcgacgaagacgccctgaataccgatagcaccggcggcaacggccagaccttccagtccaacaacatcgagcgggcggtgatcaagggcgtcgagctcaagggccgcctggagctgggcgccttcggcgcgccgcagggactctacacccagggcagcgtggcctacgcctacggtcgcaacaaggacaacggcgagccgatcaacagcgtcaacccactcaccggagtgttcggcctgggctacgacgaagcagacggcaactacggcgggctgctcagctggaccctggtcaaacgcaaggatcgcgtcgacgacagcaccttccacaccccggatggcaccgccagccagttcaagaccccgggcttcggcgtcctcgacctcagcgcctactacaggctgagcaaggacctgaccctcaacgccggtctctacaacctgaccgacaagaaatactggctgtgggatgacgtgcgcggctacgacagcgtcggcgaggcttcggcgctggccccggccaacatcgaccggctgtcccagccaggccgcaatttcgcggtcaacctggtctgggacatctgacccgttaccccttcgcacacggaagtgcccccatacccagcgcctggccatgccgggcgctttccatgccacaggtgaaagccgtcctccggatcagggataatgatcccggcaaacggagcgcccatgatccacctgtgtccctcttcccatctcgccgaaggcaacagccgcggcttcctcgtcgatgagcggcggctgttcgcggtgcgtcgcgacggccgcgcctacatctacctgaaccgctgcccgcatcgcggcatcccgttggagtggcagcccgatgccttcctcgacgacagcgccagcctgatccgttgcgccagccacggcgcgctgttcctcatcgagtccggcgagtgcgtcgccggcccctgcgctggcgagcgcttgcgcgccctgccctgccgggaagacgccgaaggcctctgggtggagctggacgactgacccaacgggggatgggcggcaagccgcgaggcaacggctaggcttgcggcacaaagataaaaaagaggaaggaacgcgccatgcgccgattcagcctgcgcttcgtcctgctgctcctgttcggcctgctgctctatgcctgccgcaatgaaccgggccccgtacggctcgcccctggcgtaacagcggcggattaccggactttcttcatccaggcggtacgcgccgaggggcaccgcatcgacttcgaggagcgtttcgatacggccgtgcgccgcgccctggaggccaagggctatcgctaccacgcggaacacggcgacctgcgggtgatctacgccctcggcctgcaacgccagccgggcctggaaatgcgcccggtgatcacccaggatggcgtcttcacccagacccaactgaccgaagacaccgaggccaggctggcgctgcgcatccttgacgaaagcaacggcagggtccttctgtaaagcgtgctgagccgccaactgcacgatccggcgctgacccaggaagcgttcgaccgcggcgtcgcgcagttgctgaaggacttcccgagccgcagtcaaccttgaatgtcacaggccgtcgaagtcgtcctcgcgacgctcggcgctctcgccgggtgccgacagccggggcggccgccgttgcagccaccacagggcggcgatccccagggcagccattgcgccgcggaacagcaggccgaacaggttgccgtcggcctccatcccgccctcgatccaggcaatcaatagccgcgacagggtcaggatcgattgcagcagcactaccaggatcaacgccggctgcaccagcgaagcccggcgcagggcgaacagcaggaacaacgccagggcgaactgatggccgccatagaacacccgcgcatcgctgaccgccgaaggctccatcagcagcatgccactgagattggccatctcgtagggacgcacccagtacagcactcccagcgcgccccataccagcgcctgaaccagcaaaaccaaacgggcgaagagcatcccctttctcctcgggcctgttgccccagcggtcagttcgacaccggcggcgaacgccccggcaaccctaaggacagcagacccaaaccgcgccgacgagttcgctgcgacaatccgtccctgcccaacggcaacccggcgcggcgggcagcgcatcgcttcgtcacaagtggatacagctcaccggctgggtggcggcgggtgccagcggtatgctcccggcattcgctcgcagcaaggagaatcccatgcgccgcttcgcacccctggccgtcctggccgccaccctgctccacggctccctggtccaggccgccgaaccgctggccatcgacgtccaccgcgacgccaactgcggctgctgcaaggactggatcaagcacctcgaagccaacggtttcaaggtcaccgaccatgtggaagcagatatgagcgcagtcaagagccgtctcggcgtgccctacagcatgggctcctgtcataccggagtgatcgacggcaagttcgtcgaaggccacgtgccggcagccgacatcctcaagctgcgcgaacgcgccgacctggtcggcgccgccgtaccgggcatgccggtcggctcgccgggcatggaaatgggcgaccgccaggacgcctaccaggtcgtcggcctgaccaggagcggccaggcctcggtactggcggagtacccgggacgctaacgaaaacgccgttttccccagggaaaacggcgtttttccttgtagcaggacgtgaggatcactccgccaggctatcgaccttcctctgcggcgacagcagcccgtcggcgcggaacatcgccttgatcccgcgcaccgcctggcgcaggcggtcgcggttctcgatcagggcgaaacgcacatgatcgtcgccgtagtcgccgaagccgatccccggcgacaccgagaccttggcgtcctgcaacagcttcttggcgaactccagcgagcccagatgcgcgtagggctcggggatcttcgcccagacgtacatcgaggccttcgggttctccaccatccagccggcctcgcgcagccccttcaccaggacgtcgcggcgctgctggtactgccgggcgatatcgcggacgcactgctggtcgccttccagagcggcaatggccgccacctgcaggggcgtgaaggtgccgtagtcgtggtagctcttgatccgcgccagggccgagaccagctcgggattgccgaccatgaagccgatccgccagccggccatgttgtagctcttcgacagggtgaagaactccacggcgatatccttggcacccggtacctgcatgattgacggcgctttccagccgtcgtagacgatgtctgcataggccaggtcgtgcacgaccatcacgtcgtactgcttggccagcgccaccacgcgctcgaagaagtccagctcgacgcactgcgcggtagggttggaggggaaaccgagaatcatcatgcgcggcttgggaatcgattcgcggatcgcccgttccagctcgttgaagaaatcgatgcccggcaccagcggcaccgagcgcacctgggcgccggcgatcaccgcaccgtagatgtggatcggatagctcgggttgggcacgaggatggtgtcgccatggtcgagggtcgccagcatcaggtgcgcgaggccttccttggagccgatggtgacgatggcttcgctttccgggtcgatctgcacgtcatagcggtcgcggtaccagtgcgagatggcccggcgcaggcgcgggatgccgcgcgaggtggagtagccatgagtgtcttcgcgctgggcgacggtgcagagcttctcgacgatatgcggcggggtcggcccgtcgggattgcccatgctcaggtcgatgatgtcctcgccacggcgacgagcggccatcttcagttcggcggtgatattgaaaacgtaggggggaaggcggtcgatgcgcgcgaaacggcgcgcagggcgtgattcagccatgctgtcctcggagtaacgtaagcgcccggaaccgtccgagcgacgccggccgctgcggcggcctggaaagcgccagccaggcgctttcttgtcggcgaacataaaggccgataggctgcttgtcgagtcccccctcgcgtttttcattccatttcacaggaaaaggcccatgtcccgacgctactggcaactcgatgtgttcgccgagcgtccgctcaccggcaacggcctggccgtgttcgacgacgccagcgccctcgatgacgccgccatgcaggcctggacccgcgaactgcgccagttcgagtcgatcttcctgctgccgggcgacgacccacgggccttccgcgcacggatcttcaccctggaggaagaactgccgttcgccggccacccgctgctcggcgccgccgccctgctccatcacctgcgcggcggcgacaacgaacagcactggacgctgcacctggccagcaaatcggtggccctgcgcagcgtgcgggcgggcagaggtttctacgccgagatggaccagggccacgccgaattcggcgccaccccggacgccgggacctgccgctggttcgccgaagccttctcgctatcggccaacgacctgtccgggcatccgccgcgggtggtgagcaccggcctgccctacctgctcctgccggtgaccgccgaggcgctgggtcgagcccgtcaggtcaacgatttgcaagaagccctggataaactcggcgcggcgtttgtctatctgctcgacgtcgacgggcgcgagggccggacctgggacagcctggggctggtggaagacgtggctaccggcagcgctgccggtccggtcgccgcctacctggtggaatacgggcttgccgcgcgcggcgaacccttcgtcctgcaccaaggacgcttcctcgagcggccgagccggctcgacgtccaggtcgcgacagacggtagcgtcagggtcggcggccacgtccaactgctcgcccgcgccgagctgctgacctcggcctgacggccggggtggcgctggcggcggacgacgacaacactgaagaagcgaaacgtacaggagaaccgccatgctctggcgcaaaggacgacgcagtgacaacgtgattgatgcccggggcgaaggaggcgcaggcggcggtggcggcatgcgcatcggcggcaagggcctcagcctgggtggggtggccatcgtggtggtggtcggcctgctgatgggccaggacccgatgcagatcctcgggtcgctgctcggccagatggatagcccggcgccggccacccagcagcaggccggcgttcgggccccggcggccaacgacgagcagagcgagttcgtccgctcgatcctcggcgacaccgaggacacctgggaacagatcttcgccagcggccaggcacaataccaacagcccaagctggtgctgttcagcaatggggtgaattccgcctgcggcttcgcctcgtcggccaccgggccgttctactgtccggccgaccgccgggtctacctcgacctggagttcttccgcgagatggaacagcgcttctccgccgccggcgacttcgcccaggcctatgtgatcgcccacgaggtcggccaccacgtgcagaacctgatgggcatctcggccaagatcaacgcagcccgccagcgtggcgcgcacatggagggcgccaacggcctgtcggtacgccaggaactgcaggcggactgcttcgccggggtctgggccaaccgtgcacagcagcggctgaactggctggagccgggcgacatcgaggaagccctgaacgccgccaacgccatcggcgacgatcgcctgcaacgccagggccgcggcatggtggtgccggactccttcacccatggctcctcggcgcaacgcatgcgctggttcaagaccggcttcgagagcggctcgccggccagttgcgataccttcaaggcccagacgctctgagcctcgccgccagccgggcgcttagcgccccggctggcttcccagcgcattcaactgatcggccagttccctggcctcgtaggccgaagccaacccgtcgagatagaccttgccgttgcggatcggctcgcgcacccgcggcgccaggcgcaggcgcccgtccaccagtaccgcgagagtgcgcccccgggcctcgccggtcagcgcggccaggcggcgggcggccggttcggtgaaggtgacttcgacgccgggtcgaccgttctggtcgtacaggacctcggcgcggagtacgtcagcctgggtcaggctgggcttcagcgccaccagcatggccttgccctgcgggtcggccagggtgcggaacgccgcggaaggcgtgctggcggtggcatagaccccgaagctgtgctgcgggatcggcagcggatcgctggcgcaggcggccagcagcagcgccaggcccagcggaaggaatgcgagtttcgagcgtttcatgatgaggtactgcagaaaacctgggcggagcgtccgtccggacgccaacgcctatgttaacgccgcccgcgccgggcgggcgagcagggccttccgcgaggcgacgatcgactagactggcggaaattcacccctctcccgcgaactggtatgatgcgcgccttttcgagccgtatgaaccccacgcaggccgccgcgaggcccctggcgtgcgtgggtcgtttcatgcggctcgcgcattttcgggactcagccgtctgccgggatcgttcgcgataccgcgccgacgagacagcgatgcaacgcccgccacgcggaaattcggttttccctggtcggcggccggctccacggccggccacttctgctggcgccatggggatcgttgcagagcacattcaggggaatccaacatgctggaaaagctgtttcaactaaaggcgcacaacaccacggtgcgcaccgagatcctggcggggatcaccaccttcctgaccatggcctacatcctcttcgtcaacccgagcatcctcggcgagaccggcatggacaagggcgcggtgttcgtcgccacctgcctggcagcggccatcggctcgaccatcatgggcctgatcgccaactacccgatcgccctggcccccggcatgggcctcaacgccttcttcacctacaccgtggtgctgcacatgggccacagctggcaggtcgcgctgggcgcagtgttcatttccgccaccatgttcttcctgctgtcgatctttcgcatccgcgaatggatcatcaacagcatccccctgccgctgcgctcggcaatcgccgccggtatcggcctgttcctcgcactgatcgccctgcagaacgcgggcatcgtggtggacaacccggcaaccctgatcggcatgggcgacctgaccaagccggcgccgatcctcgccaccctcggcttcatcctgatcgtcgccctggaggcgcgtagcgtcaccggcgcggtgctgatcggtatcctggtagtcaccgccatcgccatcctgctcggcgtgacccagttcggcggcgtggtctcgatgccgccgtcgctggcgccgaccttcctccaactggacatcaagggcgcgctggacatcggcctggtcagcgtgatcttcgccttcctcttcgtcgacctgttcgacaactccggcaccctgatcggcgtcgccaagcgcgccggactgatgggcaaggacggccacatgccgaagatgggccgcgcgctgatcgccgacagtaccgccgccatgggcggctcgctgctgggcacctcgaccaccaccagctacatcgagtccgccgcgggcgtcagcgccggcggccgcaccggcctgaccgccatcgtcgtcgccatcctgttcctcctcgcgctgttcttcgccccactggccggcagcgtaccggccttcgccaccgccccggcgctgctcttcgtcgccgtgctgatggcctcgggcctggcagagatcgactgggaagacatcaccgtcgccgcgccggtggtcgtcaccgcgctagccatgccgttcacctactcgatcgccaccggcatcgccttcggcttcatttcctggaccgcgatcaaggtgctgtccgggcgctggcgcgaactgaacccggcgctggtgatcctctccgtgctgttcgtgatcaagctgggcttcttcaacgcatgagccgtccacagttcgaccccagcgcctacgccgcgcaactggaagacaagaagtcccgcctcgccggattgctggccccgttcgcggcacccgcgccggaggtcttcgagtcgccgcgcgagcattaccggctgcgcgccgaattccgcctgtggcgggaaaccggcaacgagaagcgtcactacgcgatgttcgagcagggcgacaagcacacgccgatcctgatcgaggatttccccatcgccagccgccgcatcaacgaactgatgccgcgcctgaaggcggcctgggccgacccggcgctgggcttcaagctgttccaggtggagtttctcaccaccctggccggcgacgcgctgatcaccctctgctaccaccggccgatcgacgacgcctggcgacaggcagcggaaaagctcgcggcggaactgggcgtgaacctggtcgggcgttcgcgcggcaagcgtatcgtcgtcggacgcgactatgtggaggaggaactgtcggtcgccggccggcgcttccgctaccgccagcccgagggggctttcacccagcccaacggcgaggtcaaccagaagatgctcggctgggcctacgaggcgctcggccagcgcgacgacgacctgctcgaactgtactgcggcaacggcaacttcaccctgcccctggccacccgggtacgcaaggtgctggccaccgagatcagcaagtcctcggtcaatgcggcgctggccaacctggccgacaacgcggtggacaacgtcagcctggtgcgcctgtcggccgaagagctgacccaggcgctgaacgaggttcgcccgttccgccgcctggccgacatcgatctgaagagctacgccttcggcaatgtcttcgtcgacccgccacgagccggcatggatccggacacctgcgagctgacccggcgcttcgagcgcatcctgtacatttcgtgcaacccggaaaccctggcgcagaacatcgcccaactgcacgacacgcaccggatcagccgctgcgcgctgttcgaccagttcccctacacccaccacatggaaagcggcgtcctgctcgaacgccgctgagcgagtggccgcgccccacggcgcggccatgcctcagagtcgcaccgggaggcgccgcgccaggtgcaatccttgcgtcgtcacctcggcgccataggccagcacctcgacgcccgcttgcgccgcctcgcgcaacgccttgccataggcgggatcgatctcgtcggcggggcgcaccgcctcgaccccggaaaggttcacgcagtacagctgcaccgcgcggatcccctcccgcgccagcgccgccagttcgcgcaggtgcttggcgccgcgcagcgtcaccgcgtcgggaaaggccgccacggcggtttcgtcgaagcccagggtgacgctcttcacctcgatgaacagtgcgcccgtggggtattccaggcgaaagtcggcgcgactgttctccacgccgtaggccacttcccggcgcagagcggtgaaaccggcaagctccgcgatgtccccggccagcagcgcctcctctaccaggcggttggcccgcgccgtgttgacgcaggccaggcggccctgcggggtctcgctcagctcccaggtccccggcagcttgcgcttggggtcgttggagcggctgaaccagacccggcagccttcgctcatgcaattgagcatcgaaccggtattcggacagtggatggtcaggcgctcgccgccggcgctctcgatatcggcgaggaaacgcttgtagcgacgcagcaggcggccttcttccagtggctgctcgaaacgcatcagggccgccagttcttcaggccgcgggcgatccgctccaccgcttcctgcaggcgcggcaggttctgggtataggcgaaacgcacgtggtggccggcctggtggcggccgaaatccagccccggggtgaaggccacgtgctcggtctcgatgaagtgtttgcagaaggcgtaggcatcgccgccgaacgcgctgatatcggcgtagagatagaaggcgccttccggctccacggcgattccgaaacccagctcgcgcagggccggcaggaggaagtcgcgacggcgggcgaactcttcgcgacgctcttcgagaatggcgatggtggtcggctcgaaacaggccagcgcggcctgctgggccatgctcggcgcgctgatgtagaggttctgcgccagcttctccagctcaggcaccgccgctgccggcgccaccagccagcccaggcgccagccggtcatgccgaaatacttggaaaaactattcaggacgaaagcgtcgtcgtcgacttccagcaccgaggcggcgtccacgccataggtcaggccgtgatagatctcgtccaccaccaggtgcccgccgcgggccttcaaggcgcccgacaggccggccaattcgtcgcgatcgagcagggtcccggtcggattcgccggcgtcgccaccagagcgcctacactgtctgaatcccagtgtcgctcgatgagatccggcgtcagctggtaacggctgtccggccccaccggcaccagttgcgcggcgccttccaccaggcgcaggaaatgcctgttgcaggggtagcccgggtcggcgagcaaccagtggcggccggggtcgaccagcaagctgctggccagcagcagggcgccggagccgcccggagtgaccagcacgcgctgcgggtcgaggtcgaccccgtagcgttcgccgtagaatttcgcgatcgcctcgcgcagcgccggcaggccgcgggcggcggtgtagcgggtatgcccggcggccagggcggcgcgcccggcctcgacgatcggctcggccgtggtgaagtccggctcgccgatctccaggtggatcacatcgtggccggcggcctgcaactcgttggcccgcgccagcagggccatgacatggaaaggctcgatggcccgactgcgcgcgctataggaggtagccatggatattccgaactttgcgaggaaaaaccgattctaaccaagccattacgcgggcgacaccagcctcgacaaccgggagtagcgccaaggttatcgttctggtaagttcgcccgcttgcgaccgcggggccggagagccggcgagggaaccctgccgcggacaggattagcgaaagtgagaggcggccattcatgtccaccaaagcaaaacaacagagcagccagcagatgacccgcggcttcgaaccctatcaggaaaccaagggcgaggagtacatgagcgagcgcatgcgcgcgcacttcaccgcgatcctgaacaaatggaaacaggagctgatggaagaagtcgaccgtaccgtgcatcacatgcaggacgaagcggccaacttccccgatccggccgaccgcgccagccaggaagaagaattcagcctggaactgcgcgcccgcgaccgcgagcgcaagctgatcaagaagatcgacgagaccctgcaactgatcgaagacgaagagtacggctggtgcgactcctgcggcgtcgagatcggcatccgtcgcctggaggcgcgccccaccgcgaccctctgcatcgactgcaagaccctcgcggaaatccgcgagaagcaactcggctcctgagccggaccgacggggcgccaaggcgccccgtttcgtttccgccgttccccgccgcaccgctcgcgccatgacctcttcctatgtaggccgcttcgccccgacgcccagcggctacctgcacttcggttccctggtggcggccgtcgcctcctacctggacgcacgtgccgtcggcggccgctggctggtgcgcatggaggacctcgacccgccccgcgaagtcccgggcgcccagcaggcgatcctggaaaccctggagcgctacggcttcgaatgggacggcgcggtggagcggcagagcgaacgcttcccggcctacgccgcagtggtcgagcaactgctgcgcagcggcctggcctacgcctgcacttgctcgcgcaagcagcttgagggattcgccgggatctacccgggcttctgccgcgacgccgggcacgcccgcgaggatgcggcgatccgcctgcgcgtgccggagctggaatatcgcttcgtcgaccgcgtgcagggcgaagtccaccagcatctcggccgcgaggtcggcgatttcgtcatccagcgccgcgatggcttctacgcctaccaactggcggtggtgctggacgacgcctggcagggcatcaccgacatcgtccgcggcgccgacctgctcgactcgaccccgcgccagctttacctccaggaattgctggggttgagccagccgcgctacctgcacgtgccgctgatcgtccagccggacgggcacaagctcggcaagtcctaccgctccccgccactgcccgccgagcaggccgccgcgccgctgacccgcgccctgcgcgcgctcggccagcggccgccggccgaactggcccaggccagcgccagcgaggcgctggcctggggcgtcgcgcactgggacgccacgcgcatcccgcgctgcgctacccttcccgaggaacgcctgtagcccgcccggcggcttgccggcacccacccgcagcctgtagcctgccggcccaagcatgagggaagcggcatgtacatctaccgactggtcctgctcctggtcgtgggcatctatctcttttcccccgccatcatggactggtggatcgaccccaacggcgcctggtaccgcccgtacctgctgtggctgatcctcatcgtggtcactttcatcctgcagagccagcgcgatgctgacgagctttagcctgacccagctgatcctgatcagcgtcgcctacctctccaccctcttcggcatcgcctggatcaccgagcgcggctacgtgccgcgccggctggtacgccacccgctggtctacaccctgtcgctgggcgtctacgccagtgcctgggcgttctacggcacggtaggcctggcctaccagtacggctatgggttcctcgccatctacctggggatttccggggccttcctgctcgccccggtgctgctctatccgatcctccgggtgacacgcgcctaccagctgtcctcgctggccgacctcttcgccttccgtttccgcagtacctgggccggcgccctgaccacgctgttcatgctgatcggcgtgctgccgatgctggccctgcagatccaggcggtcaccgattcgatcagcattctcacccgcgacccggcccaggagcgggtcgcgttcgtcttctgcaccctgatcaccctgttcgcgatcctcttcggcgctcgccacatcgccacccgcgaacgccacgagggactggtgttcgccatcgccttcgagtcgctggtcaagctggtgatgctcggcagtatcggcctctacgccctgtacggcgtcttcggcgggccggaaggcctggaagtctggctgctgcagaaccagaccgcgctgaccaccctgcacacgccgctggccgaaggtccatggcgaacgctgctgctggtgttcttcgccgcggccatcgtgatgccgcacatgttccacatgatcttcaccgagaacctcaacccgcgcgcgctgatttccgccagttggggcctgccgctgttcctgctgctgatgagcctggcggtaccgccgatcctctgggccgggctgcgcctcggcgcctcgaccacaccggagtactacaccatcggcctcggcctggcggtggacagcccggccctggccctggccgccttcatcggcggcatctccgccgccagcgggctgactatcgtgatgaccctggcgctctcgggaatggtcctcaaccacctggtgctgccgctctaccagccgccggcgcagggcaacatctaccgctggctgaaatggacccggcgcctgctgatcgtcgccatcatcatggccagctacgccttctacctgctgctgggcgccgaacaggacctctccaacctgggcatagtgtccttcgtcgccaccctgcaattccttcccggcgccctctcggtgctgtactggccgaccgccaaccgccgtggcttcatctccgggctgatcgccggcatgctggtctgggcgatcaccatgctgctgcccctgatggggaacgtacagggcctgtacctgccgctgttcgacgtgatctacgtgctggacgattcgaactggcacctggcggcgctgtcctcgctggcggccaacgtgctggtattcaccctggtgtcgctgttcaccgaggccagcgacgaggaaaaaggcgccgccgaggcctgcgcggtggacaacgtacgccgtccgcaacgccgcgaactgttcgccggttcgccgcaggagttcgccagccagttggccaagccgctgggcgccaagaccgcgcagaaggaggtcgagcaggccctgcgcgatctccacctgcccttcgacgaacgtcgcccctatgccctgcgtcgcttgcgcgaccgcatcgaggcgaacctttccgggctgatgggacccagtgtcgcccaggacatcgtggagaccttccttccctacaagaccagcgaagaaagctacgtcaccgaggacatccacttcatcgagagccgcctggaggactatcactcccggctgactggcctggctgccgaactcgacaccttgcgccgctaccaccggcagaccctgcaagacctgccgatgggcgtctgctccctggccaaggaccaggaagtgttgatgtggaaccgcgccatcgaggaactcaccggggtcggcgcgcagaaggtcgtcggttcgcgcctgtcggccttgcccgaaccctggaagggcctgctggaacgtttcatcgacgcccccgacgagcacctgcacaagcagcgcctggtctacgacggccacacccgctggctgaacctgcacaaggcggccatcgaggaacccctggcgccgggcaacagcggcctggtgctactggtggaagacctcaccgaaacccaactgttggaagacaagctggtccactccgagcgcctggcttccatcggccgccttgccgccggggtggcccacgagatcggcaatccgatcaccggcatcgcctgcctggcgcagaacctgcgcgaggaacgcgaaggcgacggcgagctgaccgaaatcagcgagcagatcctcgaccagaccaagcgcgtatcgcgcatcgtccagtcgttgatgagcttcgcccactccggcagccacctgcaggccctggaaccggtgtgcctgagcgaagtcgcccaggaggccatcggactgctgtcgctgaaccggcgtagcgtcgaagtagagttcttcaacctctgcgatccggcgcactgggtcgagggagactcgcagcgcctggcccaggtgctgatcaacctgctctccaatgctcgcgacgccagcccgccgggcggcgcgatccgggtccgcagcgaagcctcggaacataccgtggacctggtcgtcgaggacgagggcagcggcattccgaaggcgatcatggaccagttgttcgaaccgttcttcaccaccaaggaccccggcaaggggaccgggctcggcctcgcactggtctattcgatcgtggaagagcattatggacagataaccatcgagagcccgacggatcaccagcgagaaggcggcacccgcttccgcgtgaccctgccgcggcaccctggcccgacggccgagctgtagacgagcacgtcgagagagctgaatacatggcacatattctgatcgtcgaagacgaaaccattatccgatctgcattgcgacgcctgctggagcgcaaccagtaccaggtcagcgaagccggctcggtgcaggaagcccaggagcgctacaccatcccctccttcgacatggtggtcagcgacctgcgcctgccgggcgcccccggcaccgaactgatcaagctcgccgaaggcattccggtgctgatcatgaccagctacgccagcctgcgttcggcggtggattcgatgaagatgggcgcggtggactacatcgccaagcctttcgaccacgacgaaatgctccaggccgtggcgcgcatcctcaaggaccgccaggagaaccgcagcgcggccccggtctccgccaacggcggcaaggccggcggcgagcgcggcgccagcccggcggcagccgacggcgagataggcatcatcggctcctgtgcgccgatgcaagagctgtacagcaagattcgcaaggtcgcgccgaccgactccacggtactgatccagggcgagtccggcaccggcaaggaactggtcgcccgcgccctgcacaacctgtcgaagcgcgccaaggcgccgctgatctcggtgaactgtgcggcgattccggaaaccctgatcgaatccgagctgttcggccatgaaaaaggcgccttcaccggtgccagcgccgggcgcgccgggctggtcgaagcggccgacggcggcaccctgttcctcgacgagatcggcgaactgccgctggaggcccaggcccgcctgctgcgcgtattgcaggaaggcgagatccgccgggtcggctcggtgcaatcgcagaaggtcgacgtgcgcctgatcgccgccacccaccgcgacctgaaaaccctggccaagaccgggcaattccgcgaagacctctattaccgcctgcatgtgatctcgctgaagctgcccgccctgcgcgagcgtggcaacgacgtgatggagatcgcccgcgcctttctggctcgccagtgcacccggatggggcgcgcgccgctcagcttcgcccacgacgccgaacaggcgatccgccattacccatggccgggcaacgtgcgcgaactggaaaacgccatcgagcgggcggtgatcctcagcgagagccaggaaatccacgccgacctgctgggtatcgacatcgagctggacgacctcgaggacgacttcgccgccgacctcggcctcggcccggcgggcgccgcggccagcaaccacgagcccaccgaggacctttcgctggaagactacttccagcacttcgtcctcgagcaccaggaccacatgaccgagaccgagctggcccgcaagctgggcatcagccgcaaatgcctgtgggaacgccgccagcgcctgggcattccgcgacgcaaatcaggggcctcggccgactcgtaacaccctgcaacctgttaccgcagacgtaccgcgtaacagaaaccgggttcatcggtaacgggaacccggtttttttgtgcccttcgccgacccaccgaaaacctcaaccccttgattttactgggtttcgaaaaactggcacggcatctgcttatgtattggcacaacaacaataacaagcaacgacgaagacaataaaaacaacacgtaacgactccagcacaacaaaaacaaaatcgcggaggcgcagctaactgattcttttggagaggagttgctgtcgggacccgtcccgcagccagtcggaagaagaataaaactgcctcgaggcagcgcacagactggttggatcgctcgacgatcatggcagcatcagcgaccaaagcaatccgtttgctattgaactcccagcctgggagatatccctgaagcgactggctcaagggacgggtcgacaaacaaaaacaacaagcccgaaatcataataaaaacaaagcacgcacctacttgggggggagcttcggctcccccagtagcttcacccctccctctgtttttcccgtttttccttcgccttacaccatttccccatccaatgctagaatccgcgcagactatgcggccatccgcatgccttgccagattcaccgcagccttcccggccctctcccgcttcgcgggaacaggatgtacggcccctgttcgtttctgtcaggatgcatggcgcagtcggttccggcgcccgggacgccctgtgcgtcgcggggccaaacattcaacgggtacagaacacgcctcgcccgagaggtcctgataatgccgcagcattacccgacgtccgtcctgtttgagcaacgcaggcgtgcaatcacccacatcgtgctcccgataacacatccatgctgaaaaagctgatccagaccattcgttcccccctgcgccgtccgcgcgccgtccgtacaaccccggaagtcatcggtaacaaccagcactccctgcgccgggaccagttcagccggaacgccgtcaaggtcgtcgagatcctccagcgtgccggctaccaggcctacgtggtcgggggctgcgtacgcgaccagatgctcggcatcgctcccaaggacttcgatgtcgccaccagcgccacgccggagcaggtccgcgccgaattccgcaacgcgcggatcatcggccgccgcttcaaactggtacacgtgcacttcggccgcgagatcatcgaggtcgccaccttccgcgcccatcatccggaaggccaggacgatggcgatagccgcgcgtccagcaacgaaagcggccgcatcctgcgcgacaacgtctatggcagcctggaagacgacgcccagcgccgcgacttcaccatcaatgccctgtacttcgacgtcaccagcgagcggctgctggactacgccaatggcgttcacgacatccgcaatcgcctgatccgcctgatcggcgatccggagcagcgttatctggaagacccggtgcggatgctgcgggcggtacgtttcgccgccaagctcgacttcgagatcgagaagcacagcgccgcgccgattcgccggctggccccgctgctgcgggaaatcccttcggcgcgcctgttcgacgaggtgctcaagctgttcctcgccggccgggccgagcgcactttcgagctgctggtcgagtacgaactgttcgcgccgctgttcccggccagcgccaaggcactgcaggccaaccccgactacaccggcaagctgatccgccaggccctggccaataccgatgcgcgcattcgccagggcaagccggtaaccccggccttcctcttcgccgcactgctctggccggccctgccggcacgcgtcgcgcagttgcaggagaaaggcatgccggccatcccggcgatgcaggaagccgcccacgaactgatcagcgaacagtgccagcggatcgccattcccaagcgtttcaccctgccgatccgcgagatctgggatatgcaggaacgtctgccgcgacgccagggcaagcgcgccgacctgctcctggaaaacccgcgcttccgcgccggctacgacttcctcctgctgcgcgaaagtgccggcgaggaaaccgaaggactcggccaatggtggaccgattaccaggaagtcagcgacagcgagcggcgcaacatgatccgcgacctggtcagccaggaagacggcagcgccccgcgcaagcgtcgccgcggcggcaacagcggccgtcggcgccgcgggccgcgcaaggaaggcagcggcggaagcggcgaatgatccagcgcgtctacgtggcgctgggcagcaacctggccgaaccgcgcgagcagatccaggctgccctcgatgccttcgagcggcttcccgagacccgcctggtcgccgtctcgccgctctacatcagcgacccgctcggccccgccgaccagccgcgcttcgtcaacggcgtggcggccctcgacaccaacctggcgccgctcgacctgctcgacgccctgcaggccatcgaactggaacaggggcgcgtccgcgacctgcgctggggtccgcgcacgctcgacctggacatcctgctgttcggcgaacaattgctcgacctgccgcgcctgaaggtgccgcactaccacatgcaggcgcgcgctttcgtgctctatcccctcgccgatctcgcccccgacctgcgcctgcccgatggccgccacctgccggagctgctcgcggcctgtccgttcgagggcatcgaacgccttccgggcgcctgaccctgcctgcccgccgctgcgcggatacctcgcggcgggctcttcacactgttaccgaaaagctgacgaaggacgtcgcggatgggcgtacactgcgcgcgcaaccgcaggcggcgcggcgttcggcagtggcagtaacgccgtaacaatgcggtaacacctgcaattgacttcgagccaccccatccggactataagtggccgtttgccccgcgccggctcatcaccggcccaacgaggagcctttccatgcctgatgtaaccctgaccaccctgcaagggttgaagcagagcggcgagaagatcgccatgctgacctgctacgacgccaccttcgcccacaccgccagccaggccggcgtggacgtgcttctggtcggagattcgctcggaatggtattgcagggtcacgacagcaccctgccggtcagcaacgaggaaatggcctatcacacggcctgcgtgaaacgcggtaacaaaggttccctgatcgtcaccgacctggccttcgaatccagccattccgtggcccagacccttgccgacgcggtccgcctgatgcaggccggcgcacacatggtcaagctggagggtggggcctggctggcggagccgatcgcccgcctggcacagatgggcgtgccggtctgcgcgcatctcggcctgaccccgcaggcggtcaacctgttcggcggcttcaaggtccagggccgccaggaaacccaggcgcgccagttgcgcgccgatgccatcgccctggagcaggccggcgccgccatgctgctgctggagtgcgtgcccagcgtgctggccgaagagatcacccaggcggtgaagatcccggtgatcgggattggcgccggtgcggcgaccgatggccaggtgctggtcatgcacgacatgctcggtctctcgctgaccggccgctcgcccaagttcgtcaaggatttcatgcaaggccaggagagcatcccggccgccatcgcggcctatgtccgcgccgtcaaggacgtgtccttccccgccgccgaacacggattcaacgcatgaacaccgtcaagaccgtccgtgaactgcgcgccgcggtggcgcgcgcccgcagcgaaggcaagcgcatcggcttcgtgccgaccatgggcaacctccacgccggccatgccgcgctggtaaagaaagccggcgaacgcgccgacttcgtggtcgtcagcatcttcgtcaacccgctgcaattcggccccagcgaagacctcgacacatacccgcggaccctcgcagccgaccaggaacgcctgctcgaagccggctgccacctgctgttcaccccgaccgtcgaggaaatgtaccccgacggcatggacgggcagacccgcatccatgttcccggcgtctccgaaggtctttgcggcgccagtcgtcccggccatttcgaaggcgtggcgaccgtggtcagcaagctgctgaacatggtccagccggacctcgcgctgttcggcgaaaaggatttccagcagttggcggtgatccgcaagctggtccgcgacctcaacctgccggtgcagatcttcggcgagccgacggtgcgcgccgccgatggcctcgcgttgtcctcgcgcaacggttacctcaacgagcagcagcgcgccgccgccccggcgatctaccgcaccctgcggcagctcggcgaacgcatccgcgccggcgccgaggacttcccggcattgctcgccgacgcccgccaggccctggaacaggccgggctgcgccccgactacctggaaatccgcgagccgatcagcctgcgccccggggtacccggcgaccgccaactggtgatcctggtcgccgcctacctgggcagtacgcggctgatcgacaacctctcagtccacctcgattgacgcatgccgagcccccggttctcgggggcttgagcgctcaccacggactcgccatactctgccgccccccgcggacccgataggagtcgccccatgcacgccataatgctcaaagccaagttgcatcgcgccgaagtcacccatgccgtcctcgactacgaaggctcctgcgccatcgacggcgattggctggacctctccggaatccgcgagtacgaacagatccagatctacaacgtcgacaacggcgagcgcttcaccacctatgcgatccgcgccgagaacggctcgaagatgatctcggtgaacggcgccgcggcacacaaggccaaggtcggcgaccgcgtgatcatctgcgcctacgcacactacagcgaagccgaactggccagccacaagccgcgcatgctgtacatggcgccgggcaaccagctcagccataccagcgaggcgattccgatacaggtcgcctgacctcgccccctctggataaagcccggtttcatccgggctttttcatgttcaaataagtgcgccatcgaattccaaccagaaggtcagccatgaagcaccacctcactccgctggatgccacgcaactcgacagttggcgcgccctggccgcccatcgccaggaactgcaggacttcaggatgcgccaggcgttcatcgacgatccggagcgcttcaagcggttttccttcagcgcctgtgggctgttcctcgacttctcgaagaacctgattcgccaggacaccatcgacctgctggtgaagctggccgaggaagcacggctgagcgacgcgatccgggcgatgttcggcggcgaggcgatcaatgcctccgagcgccggccggtactgcataccgcgctgcgtcgaccgatcggcgacaaggtgctggtcgatggcgtcgacgtgatgccggaagtccaccgcgtcctgcaccagatgaccgagctggtgggctacgtgcacaacggcctgtggcgcggctataccgaaaagccgatcaccgacgtggtgaacatcggcatcggcggctccttcctcggcccgcaactggtatccgaagccttgctgccgttcgcccagaaaggcgtgcgctgccactatctggcgaacatcgacggtagcgagttccatgaactggccagccgcctgaacgccgagaccaccctgttcatcgtttcctccaagtccttcgggaccctggaaaccctgaagaacgcccaggccgcacgcgcctggtacctggcccagggcggcaccgaggaagagctttaccgccatttcatcgccgtctccagcaacaaggaggccgcgatcgcctttggcatccgcgaggaaaacatcttccccatgtgggactgggtcggcggccgctactcgctgtggtcggccatcggcctgccgatcgccatgtccatcggcatctccaacttcaaggaactgctgtccggcgcctacaacatggaccagcatttccagaccgcgccgttcgaacgcaacatcccggtgctgctcggcctgctcggcgtctggtacggcgacttctggggcgcgaacagccacgcgatcctgccctacgactactatctgcggaatatcaccgaccacctgcaacaactggacatggaatccaacggcaagagcgtgcgccaggacggcacgccggtcaccagcggcaccgggccggtgatctggggtggtgtcggctgcaacggccagcacgcctaccatcagttgctgcaccaaggcacccagttgatcccggcggacttcatcgtcccggtgagcagctacaacccggtggccgaccatcaccagtggctgtacgccaactgcctgtcgcagagccaggcgctgatgctcggcaagagccgcgaggaggccgaggccgaactgcgcgccaagggcctgccggaagccgaagtgcagcgcctggcgccgcacaaggtgattccgggcaaccgaccgagcaacaccctggtggtcgagcgcatcagcgcccgccgcctcggcgcgctgatcgccatgtacgagcacaaggtctacgtacagagcatcctctggggcatcaacgccttcgaccaatggggcgtggagcttggcaaggaactcggcaagggtgtctattcgcgcctggtcggcagcgaggaaaccccggccgaggacgcctcgacccaaggcctgatcgacttcttccgcggccgccatcgcggctgatccgcctctccccaaagcccggccctaggccgggctttttcattccgtccggcgattgaccccggcgccttccccgctcgcgcctttggcacttgaacatggctctcgcctggcccacccttggtcgaacctggagaggggccgcgtgcggtctctcgacaccttgcggagcagaaaaacaaaggaaaccgccatgttcgagatcagcgtccacccggtgccggacgccgtccgccagcgtgcctacctgaacgacgacgactaccagcgcctgtaccgccaatccgtcgagaaccccgacgagttctggggcgagcaggccaaggccttcctcgattggttcaagccctggcacagcgtccaccacggcgacctgaggaaaggccaggccacctggttcaagggcggccagttgaacgtcgcctacaactgcatcgatcgccacctggaacgccgcggcgaacagatcgcgatcgtctgggaaggcgacaaccccagcgaatccgcgcacatcacctaccgcaagctgcaccacaacgtctgccgcctggctaacgtgctgaagagccgcggcgtggaaaagggcgaccgggtctgcatctacatgccgatgattcccgaggccgcctacgccatgctcgcctgcgcccgtatcggggcggtgcactcggtggtgttcggcggcttctcgccggactcgctgcgcgaccgcatcctcgatgccgactgccgcaccgtgatcaccgccgacgagggcgtgcgcggcggcaagtacatcccgctgaagcagaatgtggaaaaggcactgaaggactgcccggacgtctctaccgtggtggtggtcgagcgcacccagggcgacataccctgggtcgaaggccgcgacatctggtaccacgaggcgctccacgcggcctcagccgactgcccggcggaagcgatggacgccgaggacccgctgttcatcctctatacctccggcagcaccggcaagccgaagggcgtgttgcacaccaccgggggctatctgctcggcgcggcgatgacccacaagtacgtgttcgactaccacgatggcgacgtctactggtgcaccgccgacgtcggctgggtcaccggacacagctatatcgtctacggcccgctggccaacggtgccaccaccctcatgttcgagggcgtgcccaactacccggacgcctcgcgcttctggcaggtgatcgacaagcaccaggtgaatatcttctacaccgcgccgaccgcgatccgcgcgctgatgcgcgaaggcgacgccccggtccgccagacctcgcgcagcagcctgcgcctgctcggctcggtgggcgagccgatcaacccggaggcttgggagtggtactaccaggtggtcggcgagaagcgctgccccatcgtcgatacctggtggcagaccgagaccggcagcatcctgatcaccccgttgcccggcgccactgcgctaaagccaggctcggctacccgcccgttcttcggcgtgcaacccgtgctgctcgacgagaaaggcaaggaaatcgacggcgcgggcagcggcgtactggcgatcaaggccagttggccgagtcagatccgcagcgtctacggcgaccaccagcggatgatcgacacctacttcaagccctaccccgggtattacttcagcggcgacggcgcgcgccgcgacgaagacggctactactggatcaccggccgggtcgacgacgtgatcaatgtctccggacaccggatcggcaccgccgaggtcgagagcgcgctggtcctgcacgatgcggtggccgaggcggcagtggtcggctgcccgcatgacgtgaagggccaggccatctacgcgttcgtcaccctgatggccggcagtcagcccagcgaggcgctacaacaggaattgctggccctggtcggcaaggagatcggcagcttcgccaagccggatcacctgcaatgggcgcccagcctgccgaagacccgctccggcaagatcatgcggcgtatcctgcgcaagatcgcctgcaacgagctggacagtctcggcgatacctcgaccctggccgatccgggagtggtgcaggggttgatcgacaaccgcctcaaccgctgacccgcgcaaccgtcccgccgccctgcggcgcgggacggttccagtctctccggcgcctgggttaagctcgtgcctgccctgtcgtagcgagccctccatggaaagcgtccgtcgccatatcgaaagccaggtgctgagccttaccgggctcgccgtcggcggtgtcgacttcgaatcgccgaaaggcgatccgggcctgttcggccccgatgccgcctgctggaaggtccacggcgacttcagcagcatgatgatcggcggcatcggcgcgctgcttctgcagatgctccatccgctggccctggcgggggtgtgggaccactccagtttccgcgacgacctgctcgggcgcctgcgtcgtaccggtcagttcatctcggccaccacctacggtccgctggccgatgccgagcgactgatcgagcgggtccggcgcatccacgaaagcgtcatcggccagttgcccgacggcacgccctattccgccagcgacccggacctgctgacctgggtgcatgtcgccgaggtcagcagctttctcaagtcctacctgcgctatctcaatcccgacctaccgggcagcgagcaggaccgttactactcggaaatcgccctggtcgccgaacgcctcggcgcccgcgcggtgccgcgcgatcgccagcagatcgccgcctacctggaggcgatgcgtccacgcctgcgttgcgacgaacgcacccgcgaagtggtgcggattctcttcaacgcgccggcgcccagcaccctggccaggccgttcggcgcgctgatgctgcgcgcaggcgccgagctgttgccggaatgggccggatcgatgctcgacctcccgttcagtccgctgcaacgccgcctgatccgcggcagcgtcaggcgcagcgtacccttgctgcgctgggcggtgcgcaacgcttcgatgcatcgagcctgccggcgcatgggtctgccgccggtgagtcactgaactttcgtgccgtgacagcaagaatacccgtccaaaggctctgaaacggcgcgaatcacggtcggaaccttgaggccgtgccatactccaacgcaccgcttagaacggaaaacgaaagagagccatgcccaaaggactgaaacgcgctgtcagcgccctgctgatcaccttcctcgtctattgcctgctgggctttctgctcatacccggcatcgggctgcgcgtcgccaaccagcaactggcgcaatacgccaccgtccccgcacgtctcgaacgtatcgaattcaaccccttcagcctggaattgaccctctggggtctgcgcctgggcgaggagaagaacccccagctcgccttccgccggctgtacgccaacctgcagctggacagcctgtggaaacgccagctgcacctggccgacgtcgagctggaaggtccgcataccgaactgctgttcgacgagaagggccagctcaacctggccagcctgttcaggatcccgccgagcgaatcgcccgagcctgaacagccgagcgacccgttcccgctgcgcatcgaccgcatccaactggccgagggcagcctgcacttccaggacctgcgaccgagcgagccggtggacttcagcttcgatccgctgggcttcgagctgcacaacctcagcaccctgcccgacgacggcgcgaagatgaccctggtcgccaccggcccgaacggcggccgcctcgactgggaaggcgacctgaccctggtgccgatcacgtccaggggccacctgagcgtcaaggatatccagctcaaggcctggtggccctatgtccgcgacaatgccccgctggtgctggagaacggcgtggtcagcctctccagcgactatcgcctggacctgtccaaggacacccaactgctgctcgacaaagccgcgctgaaactcgccgacttcagcatcaattcgccccagggcaagccgctggccaagctcgccagcctcgacgtggccgctaccaccctggacctggccaagcaggaagtggtgctcggcgaagtccgcagccagggcctggaggcctgggccgcgcgcgagaaggacggccagctcgactggcagaaactgttcgccgacttcacgccgccgccacgcaaggcgcctgcacccaagccggcggaaaacaccgatcccgccgctaccccgaccgacgcggcgaagaccaccagcgaaccggcaaccgacggtgccgccaaggcagccgcgatagcctcgggcgaagcgagcaaggacaggccggcggagaaggacgccagcatcgccgagacggaaagggcaacggacgacaaagagtccgccaaggccgcggaaggcgctgccgacaaggtagccaagcaagagacgagcaaggctccgaagaccggcaaggcaaccgggcaggaaacggccaagactgcggaaatcgacaaggcggccagcgactctccgcaacagctcgccgacactgcaaagacgcctccgccggaaagtacgaaagcctccgcggagacgcctgccaagccctggcacatcgtcctgcgcgacgcccagttgcgcggctacaaggcgcacctggtggatcgccagccggccaccgaggtcccgctggaagtcggcccgctggacctcgacctgcagaacgtcgacagcctcggcaagacccccttcgacctcaagctcaagaccggcctcggcaaccgcggccaggtccaggccagcggccaggtggtgctcgacccggtcagcgccaggctcaaggtcagtacccgcgacatcgacctgcgcgtggcccaggcctacatctcgccgttcatccgcctggaactgcgcagcggcttccttggcagcgagctggcggtcgacctgaagagcgtcgagccgctggctttcagcgtcgacggcagcgccgaagtcagccagttgcataccctggataccatcaaggaccgcgacttcgtcaaatggaccaaactgaccctcaacggcctcgcctaccggcacgaggacagcctgtcgatccagagcgtgtccttcgaggagccctacgcccgcttcatcatcaacgaagatcgcagcaccaacgtcagcgagctgatcatcccgcaaccggctagttcgtccggcaagaccgccgccgaaagcaagaatgcgccggcgagcaagccgctgggcatccacatcggcggcgtacggatcaacaacggctcggcgaacttcgccgacctgaccctgatgccgccgttcggtaccgccatccagcagctcagcggcgaagtcggcaccctcgacacgcgcaactcgcagccggccaaggtggacatcaagggcaaggtcgacaagtacgcaccggtgaccatcgccggcgaactggacccattcgacccgctgaagaagctcgacatcaccaccagcttcaagcgcgtcgagctgaccaccctgacgccctattccggcaagttcgccggctaccgcatccgtaaggggcgactcaacctggacctgcactaccagatcgaacgtagccaactgaaggcggaaaacaaggtcctgctggaaggcctgcaactcggcgagaaggtcgacagcccggatgctgtggacctgccggtgaagctggcggtagccctgctcaaggacaccaagggcaacatcgatatccagttgccggtggccggtgatctgaacaacccggagttcagcgtcatgccgatcgtctggcagaccctgcgcaacctggtcctgcgcgccgtgcaggcgccgttcaagttcatcgccggcctcgccgccggcggtaacgaggatctcggcacggtacccttcgccgcgggcagcgacgagctgacgccggaagcccaggccaacctcgacaagctcgccgatgcgctcaaggagcggccggcgctgcgcctggaagtggaaggcgtggcctccgccgcggctgacggtccctcgatcggcgccaagcgtctcgaactggaataccagaacacctactaccgcatgctccaacgtcgcggcgacaaggtcccgagcgacgccaagcaactcgaggtaccggagaacatgcaggcgccgctgctcgaaggcatctaccggacccgcctgaagcagcagccaccagccgagtggaaggaactggacagcgacgaacgcaccgcgaagatgcgtgaagcggtgattgcttcctgggccaagagccaggtgctgctgcgccagatcggccaggcccgggccacccggatcaaggattacctggtggagaaaggccagttgccggacgatcgcatctacttgatcgacgtcagtttcgccgaaggcgaagacaagggtaatgtcgacacccaattgcacctggatagcgagtgataccttgcacaagcgattcgccgccctcgcggcccccctgctctaccttgcctgcgcgagcgcgcaggccgacaccatgcgttgcggcagtgcgctggtcagcgtcggcgaccgggccttcgaagtacagcaaaagtgcggcgatccggatcaccgcgacgacgtcggctataccctgggcagctacgatcggcgggaattcaaggtcgaggagtgggtgtacggcccgcgcaacggcgtgacctacatcctgaccttcgaagccaacaagctgaaacgcatcgagttcaagcgttgaatcgctcgcttccgcgtaccgggctggtggcgttgctgtccctgctgccattggcacatgcgcaggccgattcgctgcgttgcggcagccgcctggtcagcaccggcgacagcagcgccgacgtccttgcgcgctgcggcgagccacgcagccgcgacagcctgggttatcgcgaggtcgtcggggaatggggcaagcgctacgaggtcgaggtccaggaatggatctatggcccatggaacggcatgctgtatttcgtccgtttcgagggcaaccacctcagcgccatccagagccggcgcggcgactgaatccagcgcccatgaaaaagccccgccgggcaatctatcccggcggggcttctttctacctgctcacaggcggtcgctgaagtcgcgaacttcctgttcagccctttccttggaccagccatagcgttcctgcagcttgccgaccaggtattcggcatgtccgtcggcagcctggagatcgtcgtcggtcagatcgccccaacgttccttgatcttgccggtgagttgcttccacttacctttgatcacatcggaattcatcggtcttcctcctggtgacgagggaaaaggggtcgttcggcccgggcgcttactcgaccgatttcaggccatcggcggaaacggctttcacgcccttgatgcccttggcggtctcgatcgccaggtcacgctcggcatcgctcttcacgttgccggaaagggaaaccacacctttgttggtctcgaccttgatatcgacgccactgacattcttgttggcgatcaggctggatttcaccttgctggtgatccaggtatcggaaaccgcttcttcggttttctgcatagtgtcgttggccgccaggctgatgggctgggcagcgaacgcattggccatcgagaagctcagagcagtggcagtagcagcggcaatagcgagtttgctgaatttcattgcggtttctcctatggatttcgaaaaactgcagccattcctggcgtcagttgcatagtagatatcgcaagcgctgtgccagttttcctctaaaataaaatcctttaaaaacaataagttaaaaaacaggctggaagcgagacggttgcagaatgccgaattggcgatgacagggcttgcaaaatgcaaggattcgcccccttcgccgagaagcgtgtcgcggaaacgaaaacagggcccgagggccctgttttcatcgatcacgactcgacttacacgccggaagcttcggcggcagccacgtccttgatcgacagcttgatgcggccacggttgtccacgtcgagcaccaggaccttcacttcctggccttcctgcagcacgtcggtgaccttgtcgatgcgcttgtcgctgatctgcgagatgtgcaccaggccgtccttgcccggcaggatgttgacgaaggcaccgaagtcgacgatgcgctccaccttgccgacgtagatcttgccgatctcggcttccgcggtgatcgccaggacgcgcagcttggcggcctcggcggcttccttggtttcgccgtagatcttcacgctcccatcgtcctcgatgtcgatcgaggccttggtctcttcgcagataccacggatggtcgcgccgcccttgccgatgacgtcgcggatcttgtccgagtcgatcttcatctgcagcatggtcggggcgttctcggacagctcggcgcgcggcttggcgatgacctggttcatctggccgaggatgttcaggcgagcttccagggcctggcccagggcgatctccatgatctcttcggtgataccgttgatcttgatgtccatctgcagggcggtgacgcccttgtcggtaccggcaaccttgaagtccatgtcgcccaggtggtcttcgtcaccgaggatgtcggtcaggacggcgaacttctcgccttccttgaccaggcccatggcgataccggcgaccggcgccttgaccggcacaccggcatccatcagcgccagggaggcgccgcacacggaggccatcgagctggaaccgttggactcggtgatctcggaaaccacgcgaatggtgtaggggaactcgtcctgggtcggcagcatggcggcgacgccacgacgggccagacggccatggccgatttcacgacgacccgggctgcccatgcggccgcactcgcctaccgagaacggcgggaagttgtagtgcagcatgaaggcgtccttgcgctcgccttccagggtatccagcagttgggcatcacgcgcggtgccgagggtcgcgacgaccagggcctgggtttcgccacgggtgaacagcgcggaaccgtgggtcttgccgagcacgccgacttcgatgcgcagcggacgcacggtacgggtgtcacgaccgtcgatacgcggcttgccgttgacgatgttctcgcgaacggtgcggtattccagcaggccgaatacgtccttgacctcggaagccgggaacttgccctcttcctcgccggcgaacagggccacggcctggtcgcgcagctcgcccagacggttgtagcggtcctgcttgatggtgatggtataggcctgggagatcgcttcgcccagctctgccttgatggcgttgaccagcacggtgttttccgccggggctttccagtcccaggccggcttgccagcttcggcggccagctccttgacggcacggatcaccgcctggaactcgtcgtgggcgaacagcacggcaccgagcatctggtcttcggtcagttcgtcggcctcggactccaccatcagcacggcgtcttcggtaccggccacgaccatgtcgaggctggaactctgcagttgctcgtaggtggggttgaggatgtagccgatttccgggtggaaaccgacgcgggcggcgccgatcgggccggcgaacggaatgccggagatcgccagggcggcggaggtgccgatcatcgcggcgatgtccggatcggacttcttgttggtggaaacgacggtgcagacgacctgcacttcattcatgaaaccttcggggaacagcggacggatcggacggtcgatcaggcgcgaggtcagggtttccttctcggaaggacgtccttcacgcttgaagaaaccaccggggatacggcctgcggcgtaggtcttttcctggtagtgcacggacagcgggaagaagtcgcggccttcggccggcgacttggcgccgaccacggtgaccagcacgctgacgtcgtccatggtgaccagtacggcgccggtggcctggcgagcgatacggccggtctcgagagtgacggtcgactgaccgaactggaattgcttggttaccgggttcacggtgtctttaccttctatgttgccttgggggaaatcggtggaatgccgggagtcggacccgaatcgattcctagaaagcgcgaagctggaagcccgacgccgatacccgcctcgtgtgcgggtatcgacgccagacttccagctccttgcttcaagctgccgaccggcgtcgcttagcgacgcagacccagacggccgatcagggcagtgtagcgagacacgtctttgcccttcaggtagtccagcagcttacggcgctggttaaccatacggatcagaccacggcgggaatggtgatccttgccgttggccttgaagtgatcctgcagcttgttgatgttggcggacagcagggctacctgcacttccggggaaccggtgtcgccttcagcttgcttgtattcgttaacgatctgcgctttttcttcaacgctcagtgccatgatgggcttcctctgagtgaacaggccgggaatcgcttcccgtgttttaaaaggaggaatgaccgtgcctgctgacagccaccctcgtatcggtcttatgaccgaatcagtcgacgcggggcgatacgcccgtcgtcggtcacttcaccgataccgatgaaacgacctgtgtgatcctgcacccgcagccagccgaacttcggcgcttccggggcccgcaccggctgcccgtgcagccagtagtacgcactgtgctcggacaactgcaacaccggccaatgcaacaggccgctgtcttccggcatcaggaattggtccagcgcttccggaccaccttcggcatgcacgcgttcgagcgtctcgagggtgatcgcctgggccagggcgaacggcccggcctgggtccgccgcagtgccgcgacgtgcgcgccgcagcccaggacctggccgagatcttccaccagcgtacgcacgtaggtgcctttgctgcaggaaacggccagggtcgcacagggcggctcgaaggagagcaaatccaggcgcgtaatagtaacagaacgcgcctcgcgctccactacctctcctgcacgggcgagcttgtacagcggctgtccgtctttcttcagcgccgagtacatcggcggcacctgctctatgtcgccacggaagcgcggcagggcctgttcgagatcgtcccgaccgacggtcacgtcccgctcggcgagcagttcgccctcggcgtcgccggtggtggtggtgatgcccatgcgcatcaccgtctcgtaacccttgtcggcatcgagaagatactgggagaacttggtcgcctcgccgaagcacagcggcagcaccccggtggccagcgggtcgaggctgccggtgtggccggccttctcggcattgagcagccagcggactttctgcagtgcctggttggaactcatgccgcgcggcttgtcgagcaccaggatgccgctgatggagcggcggatacgcttcacctgggccacgctcagtcctcggtctcgtcgccgtggcggcggccgtcttcggccaccgcacgctcgatcagcgccgacagctcggcgccgcggcggatgctttcgtcgtagtggaaatgcagttgcggcacgctgcgcagcttcatcgacttgcccagcagcatgcgcaggtagccggcggcgtcgttgaggatttccatgttcagggcgatcttgccggcatcgtcctggcccatgacggtgatgaacaccttggcgtgcgccacgtcgcggctgacctcgacaccggtgatggtgaccaggcccaggcgcgggtccttgatctcgcgctggatcagttgagccagttcgcgttgcatctgatcgccgatacgctgggtacggctgtagtcttttgccatttttcaacctgcctccagcgacacccggtcactggaaaaaaaagcgacaaacgcccgggacagctggaagccggcccgggcgctgtggttacgcactcgccatcaaaggctgcgtgcgacttcgaccttctcgaacacttcgatcttgtcgccgaccttgacgtcgttgtagctcttcacgccgatgccgcactccatgccggcacgcacttcggcgacgtcgtccttgaagcgacggagagactccagctcgccttcgaagatgaccacgtcgtcgcgcagcacgcggatcggacggttgcggtgcaccatgccctcggtgaccatgcagccggcgatcgcgccgaacttcggcgagcggaacacgtcgcgcacctcggcgatgcccaggatgttctcccgcagatcgctgccgagcatgccggtcagggccttcttgacgtcctcgatgatgtcgtagatcacgttgtagtaacgcatatccagaccttcggcttcgacgatcttgcgcgcgccggcgtcggcgcgcacgttgaagccgaacagcaccgcgttggaagccagcgccaggttggcgtcggactcggtgatgccaccgacgccgccaccgaccacgcggacctgcacttcgtcgttgcccaggccgctgagcgagccttgcagagcctcgagcgaaccgcgcacatcggccttgaggacgatgttcagggtcttcttctcttcctggcccatgttctcgaagatgttttccagcttgccggcatgggctcgcgccagtttcacctcacggaacttgccttgacggaacagggcgacttcgcgggccttcttctcgtcggcgaccacggtcatctcgtcaccggcatccggcgtaccgtccaggccgaggatctcgaccgggatcgacgggccggcttccttgatcggcttgccgttctcgtcgagcatggcgcggacacgaccgtagttgatgccgaccagcaccatgtcgccctggcgcagggtaccgtcctggaccagcacggtggccaccgggccgcgtcccttgtccaggcgcgactcgaccaccacgccacggcccggggccgacggagtggctttcagttcgagcacttccgcctgcagcaggaccgcttcgagcagttcatcgacgccagtaccgagcttcgccgaaaccgggacgaagggagcgtcgccgccccactcttccgggatcacgtcgagagcggccaggccgttcttgatgttgtccgggttggcctcgggcttgtcgatcttgttcaccgcgaccacgatcggcacgcccgccgctttcgcgtgctgcacggcttcctgggtctgaggcatgacgccgtcgtcggccgcgaccaccaggatcacgatgtcggtcgcctgggcgccacgggcacgcatcgcggtgaacgcggcgtggccgggggtatccaggaaggtcaccatgccacgctcggtttcgacgtggtaggcaccgatatgctgggtgatgccgccggcctcgcccgcggcgaccttggcgcgacggatgtagtcgagcagcgaggtcttgccgtggtcgacgtggcccatgacggtgacgaccggcgcgcgggtgactgcctcgccttcgaacttcagggactcggccagttgttcttccagcgcgttctcgctgaccagcttgaccttgtggcctagctcttcggcgaccagttgggcggtctcctggtccaggacctggttgatggtcaccggggagcccatcttgaacatgaacttgacgacttcggcacccttgaccgacatctgggcggccaactcggctacggtgatggtctcaccgatgttcacttcacgcacgatcggtcctgtcgggttctggaacccgtgctggttgcgcttcttcagcttcgacttgccaccacgaccgccgcgacggtaaccatcgctttcctcgtcggtgctgcgtggagccacgcgcggagcaggaaccttttccttctccttgaccgagggacggtgctgggtgtgcttgcggtcgcggcggtcatcgtcctcgtcacgcttgggcacgcggcgcggctcttccttcttgcgctcttccacggcggcaggcttggccactggttcggcaaccgcgacatccgccaccacggcaggctcggcaccggcagtagccgctgcttcctgggcagccttggcacgcgcagcttcctcggccttgcgcgcttcctcttcggcacgctggcgggcagcggcctcttcggccttcagacgctccgcctcttccgccgcgcgctgctcctcgagttcgcgctggcgctcggcctcgatctcgtcggggctgcgcttgacataggttttcttcttgcgaacttcgacgctcaccgtcttgctgccacccactttcagcgtggtagtggtcttgcgttgcagggtgatcttgcgcggctcgctggcgcgatcgccatggctgcctttcaggtgggtcagcagggcttgcttctcgctatccgttacaacttgttcggcactggtgtgcggcagacctgcgtcacgcatctgcagcagcaggcgctccaccggtgtgtcgaccacctgggccagttctttcaccgtgacttgcgtcatgcacttctctcctcaggccgcgactgcttactcgaaccaatgggcccgggcggccatgatcaacttgccggcacgctcttcgtccatgccgtcgatgtcgagcagatcgtcgatcgattgctcggccagatcttcacgggtggttacgccacgcagcgccaggtccagggccagctccttgctcatgccatcgaggctgagcaggtcttctgccggttgtgcgtcggcgagcttctcttcggtcgcaatggccttggtcagcaggcgatccttggcacgggagcgcagctcgttgacgatgtcttcgtcgaagccatcgatgctgagcatctcttccatcggtacgtaggcgatttcctcaagagtcgtgaagccctcttccaccagtacctgggccagttcctcgtcgacatccagctcgtcgacgaagcgctgcaggatatccccggtctcggcctgttgcttggcctggatatccgcctcggtcatcacattcagggtccagccggtcaactggctggccagacggacgttctggccactgcggccgatagcctgcgccagattgtcctcggcgacggcgatatccatggtatgggtatcctcgtcgacgatgatcgccgccacctcggccggagccatggcgttgatcacgaattgcgccgggttgtcgtcccacaggacgatgtccacccgctctccaccgatctcgccggataccgcctggacgcgcgaaccgcgcatgccgatgcaggcgccctgcgggtcgatgcgcttgtccttggaacgaacggcgatcttggcgcgcgagcccgggtcacgggcggcggccatcacgtcgatcaactgctcggcgatttccggtacttcgatgcggaacagctcgatcagcatttccggcgcggtacgcgacaggaccagttgaggaccgcggttctcggtacggatctccttcagcagggcacgcacgcgggtgccaacgcggaaggtctcgcgcggaatgatctggtcgcgggccagcagcgcctcggcgttgttgccgagatcgacgatgacgttgtcgcgggtgaccttcttcacggtaccggaaatgatctcgccgaccttctcgcggtaggcatcgaccacctgggcgcgctcggcctcgcggaccttctgcacgatgacctgcttggcagtctgcgcagcgatgcggccgaactcgatggattcgatcttttcttcgatgacctcgccgaccttcgcgcccggcttctgctcctggacgtcctcgacggtgatctcggtggcggggtcctggtagtcctcgtcggcgacgacgtgccaacgacggaaagtctcgtagctgccgttatgacgattgatctcgacgcgcaggtcgacctcgtcctcgaaacgtttcttggtggcggtcgccagagccagctccagcgcctcgaaaatcacgccggccggtacgcccttttcgttggataccgactcaacaaccagcagtacttctttgctcattgtacgcctcgcctttcaatccattggatccgcggattcgcgtctcaatcaaaacggggaatgatgttggccttgtcgatcgaatcgatcggcagcaggtactcgtgatcgtccaccaggaccaccacatcctgctcctccacaccacggagaatgccttggtagttacgccgcccctcatagggcgaacgcagcctgatcttcacttgctcgccggcatgcttggcgaactgttcgagggtgaacagcggccgatccatgcccggagaggacacctccagggtgtactcgccgctgatcgggtcttcgacgtcgagaataccgctgacctgccgactgacggcttcacagtcatcgatgaggatgccttcggggcggtcgatatagacgcgcaacaccgaatgacgaccctgggaaatgaactcgacgccccagcactcatagccgagcgcctcgaccacaggggccagcaaggcctgcaactgttctagcttgctcgacacctgatcgcctcgcgtatgtcgtagaaacaaaaaatgggcgaaacgcccatccctaaattgccactcggaaccgtggcatggactgtccagctaacaaaaagcccctaaaaaggggccctgaaaaactggttgcgggggctggatttgaaccaacgaccttcgggttatgagcccgacgagctaccagactgctccaccccgcgtcaaagctggtgcaagattatacgaccgacaccctggtgggtcaaccgaaccttgcggagacaaaccccgcaggacggggcttgcttatatggtaccgaggaggggactcgaacccctacagcctatggccactaccacctcaaggtagcgtgtctaccaattccaccacctcggcagaaacctttctcttacttctgttcaggagccgccggtacatcgcctgcactttccgcaggcttggactgctcctgaagaaccggcacatcgtcagcggccggtgctttctcttgcttctgctccagaactgccggatccggcagcccgatgtgttgcagagcatcagacttttctttagcgaagtacgctaagccaaggctggtcaagaaaaaaaccgctgccagtataccagtaatccgactcaaaaaggtagcggaaccttggcttccgaaaacagttgccgaagcacctgcaccgaaagaagcccctgcatccgcacccttgccatgctgaacgaggatcaggccaacaagacccaatgccatcagcaggtgcacgacaattacgaccttttccagcatcttcagcttcccgcggcacgacagatcgcgccgaactcatccgcattgagggaggctccacctaccagccccccatcgatatccggcatgccgaacaactcggctgcacttgccgcctttacactgccgccgtaaaggagtcgcacaccttttgcgacctcggcattttccgctgccagttgcgcgcggatcgccgcgtgcacttcctgggcttgcgcgggggacgcggtcaacccggtcccgatcgcccagaccggctcgtaagccacgactgcgcgagcaaaagctccaacacccaactcgtcgatcacgcttcccagctgccttgcgacaacctccagcgtcctgcccgcctcgcgctccgcccgggtctccccgacacacagcaccggcaccaggccgcacgactgagccgcggcaaacttgcgactcacaacctcgtcactctcgccgagaatcaggcgacgctccgagtggcccacgaggaccatgctacaaccgacatccgccaactgactgggagcagtctcaccggtcagcgcgccttgcatcggctcgacggcgctgttctgcgcacctacatcgatcgccttgccggccaggccctggatgacctggctgatgaacaagcaaggcggcatcacagctacatcgactccgctcggcaacgccagctgacgcaagcctttgatcaactcggccacactggaatgcgtaccatgcattttccagttaccggccaccaagggtcgacgcatgctgtacctcgcggggcaaagtgggcgcagatgttactcaacagtttccagactggcaagcaaaatcaagcacatacctcagaaacaatttttgccaactgttcggcgtgggcacgaacgctagcttcctcgtcgccctcgaccatcacccggaccaacggctctgtgccggatttgcgcagcaggacacgaccgcgcccgcccatttgctcggtgacgcggacgctggcctccttcaccgaggggtgctcgagcggatcgctttcgcccttgaagcgcacattgatcagcacctgggggcacttgcgaatcccctggcgcgcctcggccagggtctggccgcgatgcttgagcgccatcagcacctgtagcgccgcgatgatggcatcgcccgtcgtggtgttctggcagcagacgatatgtcccgaattctcccctcccagcatccagttccgagccagcagttcggccatcacatagcgatcgccgaccttcgcccgcacgaacgggatatgcagttcctgcaaagccagctccaggccgaggttgctcatcagggtgccgaccacaccgccttgcaggcgcccgctttcctgcaggtcgcgcgcgatgaggaaaagcagttcgtcgccatccacgaccgcaccggtatggtcgaccatcatcacccggtcgccgtcgccgtcgaaggcgatgccgaggtcggcatggtgctcgaccaccgcagcctgcaggccatccaggtgagtggaaccgcacttgtcgttgatgttcaggccattcgggctggccgccagcaccgtcacttccgcgcccagttcccggaagacgctgggagcgatcttgtaggtagcgccgttggcgcagtcgagcacgaccttgagaccgttgaagtcggtgctggtcggcacgctgctcttgcagaattcgatgtagcgccccgccgcgtcattgatccgcgaaaccttgccgagacgggcggactccaccacggtcatcggcgcatcgagcagttcctcgatcatcagctcgacgtcgtccggcagcttggtcccctgcccggagaagaacttgatgccgttgtcgtcgtggggattgtgcgaagcgctgatcaccaccccggcctcggcgtggaaagtccgcgtcaggtaggcgatgccgggggtaggcatcggtcccagcaacagggtatcggcgccggaagcggagagcccggcctcgaaggccgactcgaacatgtaacccgagctgcgcgtatccttgccgatcaggacccggcagttgccctgccggcggaaggccatgcccaccgcccagcccagcttgagaacgaagtccggagtaatcggaaactcgccaacacgaccacggataccgtcagtcccgaagtattttctgctcatcttttgtcttccgtgctcaatccgccatttcaacggcggagatcattcgcatcacgtcgacggtcgccgccacgtcatgcactcgaattatccgtgcgcccttggccagcgccagggccgccagagctaggctgccgtagaggcgttcgtccacctcccgccccagtaccttgccgatcatgctcttgcgcgaaacgccgaccaacaacggcaagcccaggccatggagtgcctgcagatgcctgaacagcaccaggttgtgctccagtgtcttggcaaaaccgaaacccggatccagcaacagccgctcgcggtcgattccggccgccacgcaggcatccacacgctcctgcaggaacgcgccgacttccgccaccacatcctggtaggcaggcgcatcctgcatggtctgcggttctccacgcatgtgcatgaggcagaccgccaggccgctatccaccgcagcatccagcgcaccgtcgcgctgcagcgaacggacgtcgttgatcagacccgctccgagacgcgcagtttcgcgcatgaccgcgggcgtggaggtatccaccgaaatcacgacgtccagctcgcgagcgatgcgttcgactaccggagcgacccgctccagctcctccgtcggagaaacgctgcgcgcaccgggacgggtcgactcgccgccgacgtcgatgagcgttgcgccttcccgcaccatgcgctcggcatgccgcagggcatcgtccagccggtcgtaacggccgccatcggaaaaggaatcgggggtgacattgaggatgcccatgacatgtgggcgggccaaatcaagaacccgactgccgcaaggcagtcgggtcgggtattgcggattgctcattcagggctctcagtgctcgccggccggcccaccgatgggaggggtgttctcgcggcggcccgactcttccaggttggccggcggagtgccggtacccgaaccaccctgccagtcacgcggctcgcgcggcacgcgaccggccatgatgtcgtcgatctggtcggagtcgatggtttcgtacttcatcagtgcgtcggccatcatctccagcttgtcgcggttctcgtcgagcagtcgcttggcggtaccgtagcagtcgtcgatgatgcgccggacttcctggtcgatcatcttggcggtctcgcccgacacattggcgtgctggctgccggcgctacggccgaggaacacctcgccctcctcctccgcgtacatcagcgggccgagcttctcggacagaccccacttggtcaccatgttccgcgccaactgggtagcacgcatgatgtcgttggaagcgccagtggtgacgccttcgaagccgagggtcatctcttccgcgatacggccgccgaacagcgagcagatctggctttccagcgcgcgcttggacaggctgtagcgatcttcctcggggaggaacatggtcacgcccagggcgcgtccgcgcggaatgatggacaccttgtagaccgggtcatgctccggcaccaggcgaccgacgatggcgtggccggcttcgtggtaggcggtgttgcgcttctccttctcggacatgaccatggtcttgcgctcggcgcccatcatgatcttgtccttggccagctcgaactcgcgcatgtcgacgatgcgcttgttggagcgcgcggcgaacagcgaggcctcgttgaccaggttggccaggtcggcgccggagaaaccgggcgtaccgcgggcgatgacggcaggatcgacatggtcgcccagcggcaccttgcgcatgtgcaccttgaggatctgttcgcgcccgcggatatccggcaagccgaccaccacctggcggtcgaagcggcccggacgcagcagcgccgggtccagaacgtccggacggttggtggcagcgatgacgatgatgccatcgttcatctcgaagccatccatctccaccagcaactggttgagggtctgctcgcgctcgtcgtgaccaccgcccaggccggcgccgcgatggcggccgacggcgtcgatctcgtcgatgaagatgatgcacggcgcatgcttcttggcctggtcgaacatgtcgcggacacgggaagcgcccacgccgacgaacatctcgacgaagtcggaaccggaaatggtgaagaacggcaccttggcttcgccggcgatggccttggccagcagggtcttgccggtgccgggcgggccgaccatcagcacgccgcgcgggatacggccgcccaggcgctggaacttgcccggatcgcgaaggaactcgaccagctcgctgacctcctccttggcctcgtcgcagccggcgacatcagcgaaggtggtcttgacctggtcctcggacagcaggcgcgccttgctcttgccgaagctcatcgggccgccgcgaccgccgccgccaccctgcatctggcgcatgaagaacatgaagacggcgatgatcaccaggatcgggaagctggcgaccagcaactgggtccagatgctctgctgttcgggctgcttgccctcgaccacgacgttgttgttgaccaggtcgccgatcaggccgttgtcctggatcgccgggcggatggtcttgaaggtatcgccgtcgctacgcttgccggtgatgacatagccatccacggtcactcgctcgaccttgccatccttgacctgctggatgaagtccgagtagttcagcgtctgtggctcgctcgggctcgagaaattgttcatcacggtcaccagtaccgccgcgatgatcagccacagaatcagattctttgccatgtcgttcaattgactaccctctgaagccggctccgtcctggaaaccgcttcacacgacggccagactccttccggccaaaagtactacacaagcgcccgcgcacgcaggcgttgtctgtaaccctttatgaaccctcgcccgtcccggcacaacaggtcatcgaccaatagacaggctatagggtcaatcattccagtctattccccgcgaaagccgcgtgcgagcagatactgttcccgcgaacgatcacgcgacgacaggggcttgcgcatctgtaccttgtcgaacatttcccgggcctgcttgtggtactggtcgaaaccttcgccctggaagatcttgatcaggaaatcgccgcccggccgcagcacacggccggccaggtccagcgccagttcgcagagatacatggcgcgcggctggtcggcggcccgcactccactcatattgggggccatatcggaaatcacaaggtctaccggatggtcgccgatcgcctcgaggatccgcgcgaacaccgcgtcctcggtgaagtcgccctggatgaaggtgacgtcggggatactgtccatctcgaggatgtccgaagcgatcagccggccgcggtcgccgatcacccggctggtgacctgcgaccacccgcccggcgcggcgcccaggtcgaccacggtcatgcccggacgcaggatgcggtccttctcctggatctccagcagcttgtagctggcacgcgagcgatagccatcgcgctgggccatcttcacgtagggatcgtcgaaatgttctttcagccaacgctggctggttttggagcgggccacggaatacctcttcgggcacccccggtcggcgggggcagcatcacttggactaaaactggggtaaaatagacgactttttcccaggggtctgattatggcgctcactcaagagcagaagaaacagttcaaatctatcggtcaccacctgaaaccggtattgatcgtagccgagaacggcttgaccgaaggcgttctcgccgaactcgagcgcgcactcaacgatcacgaactgatcaaggtgaaactggcgctggccgagcgcgacgatcgccgcgccctgctcgacgaactctgcgcgcagtcgcgcagcgacctggtgcaaagcatcggcaagatggcgctggtctatcggaagaacccgaagccgaacaagaatctctcgaacatcagccgtttcgccggcatctgatgccccatccaaccaaggtcgggaaacttcccgacctggttcagacgccttcctcgtcccgccccggtaccggctgcaacaccagcagcaggccacacatcgccaccgccaggtagttgaacagcagccagcgcaccgccacgggcgccagcccacgcaccaggaaatacaccaggcagagcagcgcgacggcgagcaacaactgaccgcgaaggtctcgccaaaggctcctcggcccgtggctcgacaccaacaccagcgcctgcagcaccgcacagaatccggcgaagccgatcagcagcggcgtcaacgccgcggctacggtttccaccagcagcggcgccagtccggtcttggccaacgcaggcagaaccacgaactgcagcaaccagaggccgccgacccagaacgtctgggccagcagccaactgatcgcgcctgcgcgcaacggggcgcgcttagatatggcgaacctcgacgatctcgtactcgacgtcgccgcccggggttctcaccagcacggcatcgccctcggtcttgccgatcagcgcacgggcgatcggcgaattcaccgagatcttgccacccttgatatccgcctcgtcgtcgccgacgatctggtaggtcacggtctcgtcggtctcgacattggcgatgtcgacggtggtgccgaagatcaccttgccgctgtgcgggatggcggtgacatcgatgacctgggcgttggacagcttggcctcgatgtcgcggatacgcgcctcgaccatgccctgctgttcgcgcgccgcatggtactcggcgttttccttgaggtcgcccagttcacgcgcttcggcgatggcctggctgatctgcgggcgcagcacgcccttcaggtgtttcacttcttcttccagggcgcgggcgccctggacggtcatggggaacttgctcatgccttgattcctgcgtggagatcctgcagacgccgaacggtcttctcgggaccgaacttgagcgcctcacagatcgcctgcccacccgcaatggtggtggtgcagcagatcttgtgctgcagggcgtttcgacgaatggagtaggagtcagcgatggactgccggccctcggtggtgttgatgatcagggtgacctcgtcgttcttgatcatgtccaccacgtgcgggcgaccttcggtcaccttgttcacgcgacgcaccggcaggcccgcggcctcgatgacacgcgcggtaccggcggtggctaccacttcgaagcccagcgcgaccaggtcgccagccacctgggcggcgaacggcttgtcgtcttcgcggacgctgatgaaggcgcaaccggcggtcgggaggatttcgctggcccccaactgagccttggcaaaggcttcggcaaagctatcaccgacgcccatcacttcaccagtggacttcatttccgggccgaggatcggatcgacgccggggaacttggcgaacgggaacaccgcttccttgacgctgaagaacggcgggatgatttcctgggtgaagccgacctcggccagggtcttgccggccatgacgcgggcggcgaccttggccagcgactcgccgacgcacttggagacgaacggcacggtacgcgaggcgcgcggattgacctcgatgacgaagatatcctcgccctgcaccgccatctgcacgttcatgaggccgaccacgccaagctccagggccattttcttgacctgctcgcggatctcgtcctggatgtgctgcggcagcgagtacggcggcagcgaacaggcggagtcgccggagtgaacgccagcctgctcgatgtgctgcatgatcgcgccgatcaccacgatctcgccgtcgcataccgcgtcgatgtcgacttcgatggcgcagttgaggaagtggtcgagcagcaccgggctgtcgttggaaacctgcaccgcctcgcgcatgtagcgcttgagttcttcttcctggtagacgatttccatcgcccgcccgcccagcacgtaggacgggcgtaccaccagcggatatccgatggccttggacgcggccagggcctcgtcttcgctgcgcgcggtggcgttggccggctggcgcaggttcaggcgctggaccatctgctggaagcgctcgcggtcttcggcacggtcgatggcgtccggactggtgccgatgatcggcacgccggcctcttcgagggcgcggcagagcttcagcggggtctggccgccgtactggacgatcacgcccttgggctgctcgacgcggacgatctcaaggacgtcctcgagggtcaccggctcgaagtacaggcggtcggaggtgtcatagtcggtggagacggtttccgggttgcagttgaccatgatggtctcgtagccgtcttcgcgcatcgccagcgccgcgtgcacgcagcagtagtcgaactcgatgccctggccgatgcggttcggaccgccgccgaggatcatgatcttctcgcggctcgacgggttggcctcgcactcttcctcgtaggtcgaatacatgtaggcggtgtcggtggcgaactcggcggcgcaggtatcgacgcgcttgtagaccggcagtaccttcagcttgtggcgatggctgcgcaggttcttctcggtgacgccgagcagcttggccaggcgcgcgtcggagaagcccttgcgcttgagcttgtacatcagctcgcgatcgatggaggacaggccgagggtcttgaccttctcctcgtccttgaccaggtcctcgatctgcaccaggaaccattcgtcgatgcgggtcagctcgaacacttcctcgacgctcttgccggcgcggaaggcgtcggcgacgtaccagacacgctcggcgctgggcacggtcagctcgcgcttgaggatgctgtcggcctccgggtcgttcaggtcgagcttcggatcgaagccggtggcgccgacttccaggccgcgcaaggctttctgcaccgactcctggaaggtccggccgatggccatgacttcgccgaccgacttcatctgggtggtcaggcgggcatcggctttcgggaatttctcgaaggcgaagcgcgggatcttggtcaccacgtagtcgatggccggctcgaacgacgccggggtgcgaccgccggtgatgtcgttctgcagttcgtcgagggtgtagccgaccgccagcttggcggcgatcttggcgatcgggaaaccggtggccttggaggccagggccgaggagcgggaaacccgcgggttcatctcgatcaccaccatgcgcccggtgttcgggcagatgccgaactgcacgttggaaccgccggtttccacgccgatctcgcgcaataccgccagcgaggcgttgcgcatgatctggtattccttgtcggtcagggtctgcgccggtgccacggtgatcgagtcaccggtgtgcacgcccatcgggtcgaagttctcgatggagcagacgatgatgcagttgtccttcttgtcgcggaccacctccatctcgtattccttccaaccgatcagcgactcgtcgatcagcagctcgttggtcggcgacaggtcgaggccacgggcgcagatctcttcgaactcttcacggttgtaggcgataccgccgccggtgccgcccatggtgaaggacggacggatgatgcaggggaagccgacctgctcgagcacgccgtaggcctcctccatgctgtgggcgatgcccgagcgcggacaggccaggccgatatccttcatcgccttgtcgaagcgcgagcggtcctcggccttgtcgatggtatcggcattggcgccgatcatctccacgccgaacttctccagcacgccgtggcgctccaggtccagggcgcagttcagcgcagtctggccgcccatggtcggcagcagcgcgtcggggcgttccttctcgatgatcttggccacggtggcccacttgatcggctcgatgtaggtcgcgtcggccatcgccgggtcggtcatgatggtcgcggggttggagttcaccaggatgacgcggtagccctcctcgcgcagggccttgcaggcctgggcgccggagtagtcgaattcgcaggcctggccaatcacgatggggccggcaccgaggatcaggatgctctttatgtctgtacgttttggcatgggactctcgttgcaataatcaggacagggttgcggtggccagcttcacaccaaagccgacgaacagggcgccgacgcccgaagtggcgccggcagccaaccgttgccgccggcggaaccaggccgccagccgcacaccggtgaaaatcaggaagctcaggtaaagggcgctgaccagttccaggatcaccgccagcaccaggaacgacaggcccggataggcatagccgggatcgacgaactggatgaagaaggagatgaagaacaggatcgccttaggattcgacaggctgagcagcagcgccttgcggaacggctggtggacatccacctgttcggcctgcgccgccgtcgcttcgggattgcgcagcttgcgccaggcgccccgcagcatgccgacgccgagatagaacaggtaggccgcaccgaggtacttcaggccgatgaacagcatcggctcggccttcagcagggacgccacgccaagggccgacagcagcatcagcaccgcgtcgccgaggaacacgccgcaggcggcccggtagccggtcgccacgccacgctgggccgaagtcgcgaggacgaacaacgagttcggcccgggcaacaggatcacgaaaaccacacccagcacgtaggtccagaaatcggttatccccagggtcggcatggctctgctcctcagcgacgctcggccatcgccgagatgaagcggtcgaacagcggggcgacgtcatgcggaccggggctcgcctcggggtggccctggaagctgaaagcgaccttgtcggtgcgctcgataccctgcagggtaccgtcgaacagcgacttgtgagtggctcgcaggttgtccggcaaggtgctctcgtcgaccgcgaaaccgtggttctggctggtgatcatcaccacgccgctgtccaggtcctgcaccgggtggttggcgccgtggtggccgtggcccatcttcagggtcttggcgccagaggccagggccagcaactgatggccgaggcagatgccgaacaccgggatctcggtatcgaggaattcgcggatcgcctggatcgcgtagtcgcacggttcggggtcgccggggccgttggaaaggaagatgccgtcagggttcagcgccagcacttcgctggccggtgtctgcgccggcaccacggtcaggcggcagccgcgcgccaccagcatgcgcaggatgttcagcttgacgccgtagtcgtaggccaccacgtgatacggcagttcaccggccgggatctccgggtgactgtcgctttccaggttccagacgctggagcgccactcgtagcgctcggcggtggtgacctccttggccaggtccatgcccttcaggccggggaaggcgcgagccagctccagcgcgcgttcctcggtagcgtcggcaccagccaggatgcagccgttctgcgaacccttctcgcggaggatgcgggtcaggcgacgggtatcgatgccggcgatggcgacggtgccgttggctttcaggtagtcaggcagcgactgcttgctgcgccagttgctggcgatcagcggcaggtcgcggatgatcaggccggcggcccagacgcggttggcctcggcgtcttccggggtggtaccggtattgccgatgtgcgggtaggtcagggtgacgatctgctgggcgtaggaaggatcggtaaggatttcctggtagccggtcatggcggtgttgaacaccacctcgccaacggtctggccgtcggcaccgatggcttcaccgcgaaaaatgctgccgtcggcaagtgcaagtatggctggcttagtcaagaagacctcccgtaaatcaagcctgactggtcgcgcaggtgtaaaaaagcgggatgacaccgtgaagagtcatcccgctttttttcgattcatgctgcgctgcttttagtggacacactaaagctgtagtttacagaatcgcgacattccggtccaccaataagacgacgtgcggcagcgtctcagcgtagaccgagcacatcctgcatgtcgtacaggccgttctccttgccctccagccacagcgccgcacgcaccgcgccacgggcaaaggtcatgcggctggaagccttgtgggtgatctccacgcgctcgccctcggcggcgaacagcacggtgtggtcgcccaccacgtcgccggcgcgcacggtggcgaagccgatggtttcccgcgcccgcgcgccggtctgcccctcacgtccgtagaccgccacttcctggaggtcccggccgagcgcctgggctaccacctcgcccatgcgcaaggcggtgccggacggtgcatcgaccttgtgccggtgatgggcctcgatgatctcgatatccacttcgtcgcccagcacccgtgccgcggtatccagaagcttcagacaaaggttcacgccgacgctgaagttggcagcgaagacgatcgggatatccttcgccgcctcggccagcagcagcttctcgtcggcgctgaagccggtggtgccgatgaccatcgcccggcgcgccttgcggcactgctcgatgttcttcagggttacggagggatgggtgaagtcgatcaggacgtcgaactcctcgcagaccttgcccaggtccccggacagcggcacgccgatccggccgagaccggccagctcgccggcgtccgcccccaccagggtgctatccggacgatccaccgccgccgtcagcccggcggcaccgccggtctgctgaacggcctcgatcaggttcttgcccatgcgcccggcggcgcccactacggctatacgtcgcataaaaccactccacgcggaacccggacgcggctgtcaggccgcgcccatggctttgtttataggtcgtcgaagaaacgcttcatgccttcgaaccagccactggccttgggcgaatgcgaggtgtcgctctgcaacgacttgcggaactcctcgagcagctcgcgctggcgcttgtccaggttcaccggggtttccaccaccaccttgcacatcaggtcgccggcgccgccgccgcgcaccggggccacgcccttgccgcgcaggcggaacagcttgccggtctgggtgctttccggaatcttcagcttgacccggccatccagggtcggcacttccagctcgccgcccagcgcagcgtcggcgaaactgatcggcacttcgcagtacagatgcttgccgtcgcgctggaagatcgggtgctcgcgcacattgaccaccacgtacaggtcgcccgccggaccacccatgctgccggcctcgccttcgccggtgaggcggatgcggtcgccggtgtcgacgccggccggcaccttcaccgacagggtcttctgctcttccacgcgcccctggccatggcaggagccacagggatcggaaatcatcttgccggtgccgtggcagcgcgggcaggtctgctggaccgagaagaagccctgctgcatgcgcacctggccgataccgccgcaagtggtgcaggtgaccggtgtggtgccgggcttggcgccgctgccgttgcaggtcttgcaaccgaccagggtcggcacgcggatggtgacggtggtgccacgtaccgcctcctccaggtcgaggtccagggtgtagcgcaggtccgcgccgcgctgcgcgccgccgcgcgagccaccgcgggcaccgccgccaccgaagaaatcgctgaacacatcgccgaagatgtcggagaagctcgccccgccgaaaccggcgccagcgcccccacccatattcggatcgacgccggcatggccgtactggtcgtaggccgcccgcttgctggcatcggagaggacctcataggcctcgttggcctccttgaacttgtcctcggcttccttgtcgccaggattgcggtccgggtggtatttcatcgccaggcggcggtaggccttcttcaggtccgcctcgctggcgccacgctcaacccccagaacctcgtaaaagtctcgtttcgccataacctttccgtctcaattaaggaccctccagacacgccaacgcgggagcaggctcccgcgtggcggatcatgcgtaccggcctggccggcacgcggggcagaagcaagccggggcttacttgttgtccttgacctcttcgaactcggcgtccaccacgtcgtcagcggctttcgcctgctcgccctggggagcgtcttcgccctgctgggcctgttcggcgtacatcttctgcgccagcggggtggaagcctgggacagagcgttcatcttggcctcgatctcggccttgtcgtcgcccttcaccgccgcttccagctcgcccagcgccttctcgatggtcgccttgtcctcggcggtggccttgtcgcccgcctcggtgatcatcttgcgggtcgcgtgaaccagcgcgtcgccctggttgcgagcggcagccagttcctcgaacttgcggtcctcctcggcgttcgcctcggcatcgcggaccatctgctggatctcatcctcggacaggccggaggatgccttgatcacgatggactgctgcttgccggtggccttgtccttcgccgagacgtgcaggatgccgttggcatcgatatcgaaggtcacctcgatctgcggcacgccgcgcggagccggcggaatgtcggccaggtcgaacttgcccagcgacttgttctgcgcggcctgcttgcgctcgccctgcagcacgtggatggtcaccgcgccctggttgtcgtcggcggtggagaacacctgcgacttcttggtcgggatggtggtgttcttctcgatcagaccggtcatcacgccgcccagggtctcgatgccgagggtcagcggggtcacgtcgagcagcagcacgtccttcacgtcgccggccaggaccgcaccctggatggcggcaccgacagccacggcttcgtccgggttgacgtccttgcgcgcttccttgccgaagaactcggcaacggtcttctgtaccagcggcatgcgggtctggccgccgaccaggatcacttcatggatatcggaaacatccaggccggcatccttcagcgcggtgcggcacggctcgatggtgcgctgcaccaggtcttcgaccagggactccagcttggcgcgggaaaccttgacgttcaggtgcttcggaccgctcgcgtcggcagtcacgtacggcaggttgacgtcggtctgctgggtcgaggacagctcgatcttggctttctcggccgcttccttcagacgctgcatggccagcgggtcgcccttcaggttgatgccgctttccttcttgaactcgtcgacgaggtagtcgatcaggcggatgtcgaagtcttcgccgccgaggaaggtgtcgccgttggtggccagcacttcgaactggtgctcgccgtcgacttcggcgatctcgatcaccgacacgtcgaaggtaccgccgcccaggtcatagacgatcacggtgtggtcgcccttggccttgtccaggccgtaggccagcgccgccgcggtcggctcgttgatgatccgcttgacgtcgaggccggcgatgcggccggcgtccttggtggcctggcgctggctgtcgttgaagtaggccggaacggtgatcaccgcttcggtgaccggctcgccgaggtagtcttcggcggtcttcttcattttcttcagcacttcggcggaaatctgcggaggcgccatcttctggcccttcacttccacccaggcgtcgccgttgtcggccttgacgatgctgtacggcaccatctggatgtctttctgaaccacgttctcttcgaagcgacggccgatcaggcgcttcaccgcatacagggtgttctgcgggttggtgaccgcctggcgcttggccggctggcccaccagggtttcgccatcgttggtgtaggcgatgatcgagggggtggtacgcgcgccctcggcgttctcgatgaccttgacgttaccgttctccaggatagccacgcaggagttagtggtacccaggtcgatgccaatgattttgcccatattcactctccagaaactttgattccgtgcgacccgcccgtgggtctcgtgctcggttgactacccagatggggtcgtcgcgtcgaatttcaagcctgctcgtcgatggacggcggggtttccgccggcgccttgctgactaccaccatcgccggacgcagcaggcggccgttgagcaggtagcctttctggaacaccttgaggacactgcccggctcggccgaagcgctttcctgcatggccatcgcctggtgctgctcggggttgaaaggctcgccttccgggttcagcgcctccacctggtagcggcgcagggtgtcgtcgaacatcttcagggtcagttccatcccttcgcgcatcggcttgatcgcctcgtcgttgggatcggacatctccaggccgcgctcgagggtgtcgaccaccgccagcaggtcgccggcgaatttctccagcgcgaacttgtgcgccttctcgacatcctgctccgcacgccggcgtacgttctgcagatccgcgaccatgcgcagcgcctggtcctgggcggcagccagctgctcctccagttcctgcacgcgggcggtcaggtcctcggcggcgccggtgggctgctcgggggtctgttgatccagggtctgctgttcgtcagccatgccactctccttcaaaaataagctggcaaatacaaggcgaacgcataagttcgcaacgttgccggctatatggggacggctttccacggttcaaggggcgagcggcaattgccagccggaaaaaatactgtataaataaccagacaaaacccacggagccgcccgccatgctggttcacctgtccgttcacaactacgccatcgtcgagcacctggatctcgaactcgctaccggcatgagcgtgatcaccggcgaaaccggtgcgggcaagtcgatcatgctcgacgccctcggccttaccctcggcgaccgcgccgacagcggcgcggtacgtcccggagcggacaaggccgacattctcgccagcttcgacgtcagtgccatcgccgaggcccgcgactggctcgccgagcgcgacctggaacaggacggtccgtgcatcctgcgccgggtgatcactgccgaaggtcgctcgcgtgcctacatcaacggcacgccttgcccgctgggcgacctgaagagcctgggcgaactgctgatcgacatccatagccagcacgagcaccagtcgctgctgaagagcgagacccaccggcgcctgctcgacgagtatgccggctgccaggagctggcgcgccaggtgcagctcgccgcgcaacgctggaagcagaccagccaggaactcgaacgcctgtcgcgtagcggcgacgaacagcgcgcccgccaccagttgctcagctaccagctggaagaactggaaaacctgtccctcggcgaaaacgaactggaaagcctggagcaggagcagaagaccctgagcaacgccgaaagcctgctcgccgcctgccgccaagtcgtggaaatgtgcagcgagagcgatgccggcaacgtcctttccgcgctcaatgccagcctcaaccgcctgacctcgttcagcggccagcccgccgctctcggcgaagcggtcaatctgttgtccagcgcgcagatccaggtcgaggaggcgatcggcgaactgaaccgcttcgtcgaccacttcgatgccgatcccaatcgccagcagcaggtcgaggagcgcctggacgtcatttactccctggcgcgcaagcaccgggtccagcccgccgaactggccgacctgcagcagcgcctgttcgacgagctcgaggcgctgaacgccgacgacgaagcggtcggacgcctgggcgacgagctggccgcctacgcccggcattaccaggaaaaagccgaagaactgagccgcctgcgccaggccgcggccgcacctcttgccgccagcgtggagcaggaaatgcagcgcctgggcatgcccggggggcgcttcgccatcgtcctgcatcccggcgacagcgccgagccgcaggccaacggactggaaagcgtggagttcctggtcagcgccaaccccgggcagccgctgaaagggctggccaaggtcgcctcgggcggcgaactgtcgcggatcagcctggcgatccaggtgatcacggcacagacctcgcgcatccccaccctggtcttcgacgaagtcgacgtcggcatcggcggccccaccgccgaagtggtcggacagttgctgcgccgcctcggcgaacgcggccaggtcctcaccgtgacccacttgccgcaggtcgccgcccagggccaccagcacctgttcgtgcacaaggaacgcggcagcagcgaaacccgtacggcggtcgccaccctgaacaaggcccagcggatcgaggagatcgcccgcatgctcggcggcgtcgacctgaccaaggaatccctggcccacgcgaagaaactggtcaacctggccgcccagaactgaacgttccttcaatggaaaatgaaaacggcgaccccagggtcgccgttttcgcatggaaccgttgcgcgactacttcttcttgcgcacgtagagcaccagattgtgatcgaccagctcgaagccgcgctcgcggacgatttccttctggcgcttctcgatttccgcatccatgaactcgatcacctcgccggtatcgacgcagaccatgtggtcgtggtggccgctatcggcgagctcgaacacggcatggccgccatcgaagttgtgacgcaccaccaggccggcggcctcgaactgggtcagcacccgatagacggttgccaggcccacgtcctcgcctgcttccatcagcgccttgtacacgtcttcggcgctcatgtggcgttgctcggccgagtcgagcatctgcaggatcttgacccgcggcagggtcactttaaggccggcttttcgaagttcgctattttcaaccatgtctgctttctcagcgcgggatgtttcgcagtatcccggaatacgggtatgatcgggcttttatttgcccagccaagatagtggaagtcgctcaccgatgcaaaacgccaagctcatgctgacctgtctcgctttcgcggggcttgccgcactcgccggttgctcgtttcctggcgtctataaaatcgacatccagcaaggcaacgtcgtaacgcaggacatgatagaccagttgcgccccggaatgacccgacgccaagtgcggtttatcatgggcaacccgctcatcgtcgataccttccacgccaatcgttgggactacctctacagcatccagccgggcggcggtcgtcgccagcaggagcgcgtcagcctgttcttcaacgacagcgaccagctggccggcctgaacggcgacttcatgcccggcgtcagccgcgacgaagcgatcctcggcaaggaaggcagcaccaccgtcacccagccggccgaccagcagaaaccggaagagcagaaagaagagccgccgaaaccgggctccaccctggaacagctccagcgcgaagtggacgaagcccagccggtaccggttccgactcccgaacctctggaccccagcccgcaatgacggctggcgttccacgaaaaagcccggcattcgccgggctttttcatttccgcaggaaacccctcggctaaccgccttcgcgttcgctccgggcccgtgcggcacgctgcttgcgcacctccttgggatcggcgatcagcgggcggtagatctccacccgttcgccggcctccagcactcgctcctccgggcgtgccaggagcttgccgaagatacccagcgggcaaccttgcacatccagccctggaaaggcctcgccgatgccggagagcagcacggcctcgcgtgcgctggtacctgccggcacgctcaggcgcagtaacgcctgtcgctccggcagcgcgtagaccacctcgacggcgatctcagccatagagttgcttggcgcgctggcagaacgcgtcgaccatggtgttggcggcctgggtgaacagcggcccgagggtcgccttgaccagcggcccggcgtaatcgaaggtcaggtcgagggtgatcttgcaggccttctcgcccagcgccttgaactgccagacgccatgcagttcggtgaacggtccgttttccaggttcatctcgatggaagctcccggcaccaacacgttgcgggtggtgaagcgctggctgaggctacccttggccacggtcagctcggcgcgcatcaggctttcgctctcctccaggacctggctggccgaacaccagggcaggaactccggatagcgcttcacgtcgttcaccagatcgaacagcgcgcgggcgggataaggcaacagcgccgaacgctggatatgggtgctcatagaactctcacttctgctgtcgagcgggcgactccccaagcatagccggcgggacggcggcatccgccacggcggcgcgctgcgcccgtcgaccggggccagggttcggcagaaaaaacgctcagcgcagcctgacgccacttgaagacttttcttacaaaaccttggccagcggccaggaaaagagtgggcattgtccgaaattcacctctatccctcaagcgcgacgccgccccatagcggtgaagccggcgactccctataatgcgccgcctatggctaagcagaagaaacacccttcggggaccatcgcgcagaacaagaaggctctgcacgactatttcatcgaacaacgcttcgaggcgggcgtcgccctggcgggctgggaagtgaaaagcctgcgcgccggcaaggcccagctggtcgacagctacgtgctgctcaaggatggcgaggcctggctgctcggcagccacatcacgcccctgaccaccgccagcacgcacgtgatcgccgacccggtgcgcacgcgcaagctgctgctgcacaagcgcgaactgggcaagctgttcggcgccgtgcaacagaagggctacgcctgcgtcgccctgtcgatgtactggaagaagcacctggtcaagtgcgagatcgccctggccaagggcaagaaggacttcgacaagcgccacaccgagaaggagcgcgactccgatcgggagatccagcgcgccatgcgccacggcaaggacgactgagcgcgtcccggcccgcgcctcgctagtcttcctgcacgctgcgccggcgctgcgagcgcttcatcctgcgcgcctcttcctggacctccgccaggacctcctgcacatagtggatgtgctggttggacacctcccgggccagctccgcctgaccgctgatgatcgcgtcgtataggcgctggtgctgctccatcagttgcgcgcgggtttccgtgcgctgcgcgtacatcccgccgatattggtcaccacgttgcgccgcaacaagtcgaacaggcccttgatggtgtgcagcagcacggtgttgtggctggcctcggcgatcgccaggtggaagcgcgcgtcggcggcgccctcttccgcgctgacctggtcgttgcgcgcatagcaggcctggagcgcctcgaaggcctcggtcaggcgctggtgatcgagggaggtcgcacgcagcgccgcgtagtaggcacaggacccttccagcgtgtggcgaaactccagcaggtcgcgctgggcctccgggttaccttccagcaggtgcagcagcggatcgctgaaagtcgcacccagcgattcggtcacatagttgccgccaccctggcggctgaccagcagccccttcgccaccagtttctggatcgcctcgcgcagcgacggccgggaaaccccgaactgctcggcaagcacgcgctcggcgggcagccgctcgccggacttcagcgtgccctccaggatcatcgcctccagttgcgcaacgatgtcatccgacagacggcgctgcctgacctgaccaaattccatatcccgacacccttacccgaagtttcgtcgcaaagcctctgccatgcgcccagcgcgaaaaagagaggaagcgtaccgagccgctccccgcaccacaagcgaggcgccacgagccccgcacgagcatccttagacaaaagtcgtagacgggcaaattgacacgccgaacgctcgactcttaacctgagcgctcgcttttgtaaattggtcttaccaattatgcgagctttgccaggttcggctgcccagcgcccttgcacacacaggtcttggcgcgtatccgatctggtcacaggcaaacccaacaacaattagggagccaacccccatgcaagcctggcaacaactctatacccccctgggcagtctcggcctgtcggccgccgcggccgtcatcccgatcgtgttcttcttcctcgccctggcggtattccgcctcaagggccacatcgccggcagcatcaccctggcgctggccatcgcggtggccatcttcgccttccacatgcccgccgacatggcctttgccgccgccggctacggcttcctctacggtctctggccgatcgcctggatcatcgtcgccgcggtcttcctctacaaactgacggtgaagagcggccagttcgaggtgatccgcagctcggtgctgtcgattaccggcgaccagcgcctgcaggtactgctgatcggcttctccttcggcgccttcctcgaaggcgccgccggtttcggcgcgccggtggcgatcaccgccgccctgctcgtcggcctcggcttcaatccgctctacgccgccggcctgtgcctgatcgccaacactgcgccggtggccttcggcgcactgggcatcccgatcatcgtcgccggccaggtgaccggcatcgacgccttcaagatcggcgccatgaccggccgccaactgccgttcctgtcgatcctggtaccgttctggctggtgttcatgatggacggctggcgcggcatccgcgaaacctggccggccgccatcgtcgccggcggcagcttcgccatcacccagtacctgacgtccaacttcatcggcccggagttgccggacatcacctcggcactggtcagcctggtctccctgaccctgttcctcaaggtctggcagccgcagggcgccagcgaagcgctcgccgcaggcggcggcgcggccgtggccggtggcggcttcggcgggcaacgcagcgtcgaaccgtccgcctacagcttcggcgagatcctcaaggcctggtcgccgttcctggtgctcaccgtactggtgaccatctggaccctgaaacctttcaaggccctgttcgccccgggcggcgagctctactggctggtgttcaacttcgccatcccgcacctcgaccaactggtggtcaagggcgcaccgatcgccaccagcgccacgccgatcgccgcggtattcaagttcgacccgatctccgccaccggcacggcgatcttcctctcggcgttggtatcgatgctcatcctgcgcattggaacgaaaattggtattaccactttcaaggaagtcctggtggagctgaagtggccgatcctgtccatcggcatggtcctggccttcgccttcgtcaccaactactcgggcatgtccaccaccctggccctggtcctggccggtaccggcgcggcgttcccgttcttctcgccgttcctcggctggctgggggtattcctgaccggttcggatacgtcctccaacgccctgttcagttccctgcagtcgaccaccgcgcaccagatcggggtcagcgacaccctgctggtggccgccaataccagcggcggcgtgaccggcaagatgatctccccgcaatccatcgccgtggcctgcgccgcgaccgggatggtcggcaaggaatccgacctgttccgcttcaccctgaagcacagcctgatcttcgccgcgctggtcggactgatcaccctggcccaggcatacctattcaccggcatgctggtgcactgaccgcgccctgatcggccgcgcgtcggcgatactgcgcaggaaatggcccggggaggctcgcctacgatcgtaggcccggctcccttggccatttccgccgtatcccgctccactgcgctcgatgcaaaacctttcgacacaacggaagagcccaatgatcatttccgcttccaccgactaccgcgccgccgcccaacgcaagctgccgccgttcctcttccactacatcgacggcggcgcctacgccgagtacaccctgcgccgcaacgtcgaggacctgtcggccatcgccctgcgtcagcgggtgctgaagaacatgtccgagctgagcctggaaacccgcctgttcgacgagaccctggcgatgccggtggcgctcgccccggtcggtctcaccggcatgtacgcccgccgcggcgaggtccaggcggcgcgcgcggcggcggcgaagggcgtgcccttcaccctgtcgacggtatcggtgtgcccgatcgaggaggtcgccccggccatcgaccggccgatgtggttccagctctacgtgctgaaggaccgcggcttcatgcgcaacgccctggagcgggccaaggccgccggcgtcaccaccctggtgttcaccgtcgacatgccggtccccggcgcccgctaccgcgacgcccattccggcatgagcggcccctacgccgcgccgcgccgcatcctgcaagccatgacccacccggcctgggcctgggacgtcggcctgctgggcaagccccacgacctcggcaacatttccgcctaccgcggcaacccgaccggactggaggactacatcggctggctgggcgccaacttcgacccgtcgatttcctggaaggacctggagtggatccgcgagttctgggacggcccgatggtgatcaagggcatcctcgacccggaggatgccagggatgcggtgaagttcggcgccgacggcatcgtcgtctccaaccacggcgggcgccagctcgacggcgtgctgtccagcgcccgcgcgctgccggcgatcgccgatgcggtgaagggcgaactggcgatccttgccgactccggcatccgcaccggtctcgacgtggtgcggatgatcgccctcggcgccgacagcgtgctgctcggccgcgccttcgtctacgccctggccgccgccggcgaggccggggtgagcaacctgctcgaactgatcgaaaaggaaatgcgcgtggccatggtcctcaccggggccaagtcgatcggcgagatcagcgccgactcgctggtccgcgaactgggcgcctgagacgcccaccagaaaagcctgaaaacgcccggggcgtgaccgtcgtcccagggccgaggaaagccgatgagcctgccgattccctttctcgagaccgtcgagcggctgataccgcgcgaacgccgcttcgacgacccgctgtcgaccctggccttcggcaccgacgccagtttctaccggttgattcccaagctggtgctgcgcgtcgaaagcgaggacgaggtcgccgcgatcctatccgccgcctaccgcgagcaggtcccggtgaccttccgcgccgccggcaccagcctctccggccaggccatcagcgactcggtgctgctcgtcctcggcgacaactggaacggccgggaaatccgcgccgacggcgcgcagatccgcctgcagccgggtgtcatcggcgcccaggcgaacgcctggctggcgccgttcggccgcaagatcggtcccgacccggcctcgatcaacgcctgcaagatcggcggcatcgtcgccaacaacgccagcggcatgtgctgcggcaccgcgcagaacagctaccacaccctcgccggcctgcgcctgctgctggccgacggcacccgtctggacagcgaggacccggccagcgtcgcggccttccgcgccagccacggcgagctgctggaacggctcgccgaactcggccgcgagacccgcgccaacgccgaactggccgcgaagatccgccacaagtaccggctgaagaacaccaccggcctgtcgctgaacgcgctggtcgactacgacgagccgctggacatcctcacccacctgatggtcggctccgagggcaccctcggcttcatcagcgcggtgacctacgacaccgtcccggaacacccgcacaaggcctcggcgctgctggttttccccacggtggaaacctgctgcacggcggtcgcggtgctcaagcgccagccggtctcggcagtggaactgctcgatcggcgcagcctgcgctcggttgagaacatgcagggcatgccggaatgggtgaagagtctttccgccggtgcctgcgccctgctcatcgagtcccgcgcggcgagccgcacgctgctgcacgaacagctcgggcggatcatggcctccatcgccgaatatccgctggagaagcaggtcgacttcagcgaagacccggcggtctacaaccagctctggcgcatccgcaaggacaccttcccggctgtcggcgcggtgcgcgagaccggcaccacggtgattatcgaggacgtcaccttccccgtcgaacgactggccgagggagtcaaccgcctgatcgagctgttcgacaagcaccgctacgatgaggcgatcctcttcggccacgcgctggagggcaacctgcacttcgtcttcacccagggcttcgactcgcccgagcagatcgcccgctactcggcgttcatggacgacgtggcgcacctggtggcggtggagtacggcggctcgctgaaggccgagcatggcaccgggcgcaacatggcgccgttcgtcgagctggagtggggcgaggacgcctatcgcttgatgtggcagctcaagcgcctgctcgacccgcgcggcatcctcaacccgggtgtggtcctcagcgacgacccgcagagccacctgaagaacctcaagccgctgccggctgccgacgagatcgtcgacaagtgcatcgagtgcggtttctgcgaaccggtctgcccgtcgcgcggactgaccctaacgccacgccagcgcatcgtcctgtggcgcgacatccaggcgaagaagcgcgccggcgtcgacaccacggcgctggagcgcgactaccgctaccagggcatcgacacctgcgccgccaccggcctatgcgcccagcgctgtcctgtgaacatcaacaccggcgagctgatccgcaagctgcgcggcgccgacgcccgccacgccgaaggcgccacctggctggcgcgcaactttgccggagccatgcgtgctgcgcgcttcgccctgctcgctgccgacggcgcccggcgcctgcttggcgcgcccctgctggccagggccagccgcggcctcagccaggccagcggcggccgcgtgccgcaatggacgccggcgctgccgcagccggtacgcctggcgccgccgaccgccccgctcgacgacgagcggccgagggtggtctatctcgccgcctgcgtctcgcgtgccatgggcccggccttcggcgacgaagagcgcgagccgctgctggacaagacccgccgtctactggaaaaggccggctaccaggtggtgttcccggataacctggacaacctctgctgcggccagccgttcgcgtccaaggggtatgcgaagcaggccgacgacaagcgcgacgagctgctcgccgccctgctccaggccagccgcggcggcctcgacccgatctactgcgacaccagtccctgcaccctgcgcctggtccagggtctggacgatccgcggctgcagatccacgacccggtgaaattcatccgcagtcacctgctcgatcgcctggagttcatcccgcaggacaaaccggtagcggtgcacgtcacctgcagcacccagcacctcggcgagagccaggcgctgatcgacctggtcggccgctgcacccgcaaggtggtgatcccggaaggcatccactgctgcggcttcgccggcgacaagggcttcaccacgccggaactgaacgctcactccctgcgcagcctgaaggatgccgtgcagttctgcgaggaaggcgtatccaccagccgtacctgcgagatcggcctcagcgagcacggcgggatcgactaccgcggggtggtctacctggtggaccgggtgacgcaggcgaagggcgcgcctcggtagggcgaataaccactcgcggttgtccgccgggccatgctccgcagaagcggcggatagcgccgctggcgctattcgccctacctcacgactcccaccggtagggcgaataaccgctcgcggtcatccgccgggccatgctccgcagaagcggcggatagcgccgctggcgctattcgccctacgtcacgactcccaccggtagggcgagtagccgcctcgcggttatccgccgggccatgctccgcagaagcagcggatagcgccgctggcgctattcgccctacctcacgactcccaccggtagggcgaataaccgctcgcggttatccgccgggccatgctccgcagaagcggcggatagcgccgctggcgctattcgccctacgtcaggcgaaatggctgctccggcgtcgtcggcccgcgccgggtcgggcaaaaaatccgtcgttaagcacctcttaggtcagccgcgcctatcgtgccttccaccgcgaggacatccctcgccgaaacggaagcaggaggccttcatggcaattcaaccgttgcgactcgatccgatcaccgtgctcggcaagcaactggtcatcgagctgttcgactgcgtcgaccagcgcttcgacgatatccagtggatcgaggaaagcatgctcgaggccgcccgccaggccaacgccaccatcatcacctcggcgttccacaagttcagcccgatcggcatctccggcgtggtggtgatcgccgaatcgcacctggcgatccatacctggccggagtacggctatgccgcggtcgacgtgttcacctgcggcgacgtgctcgatggcgcccaggccgtgcgcgtgctcagcgaacgcctgggcagccgtcggcacctgatctcgagcatggaccgcggcctcggcggccatcgcctggggctgctcagccgcagcctggccggcaatggcccggtcgacgaagacagcccgaccctgcgctgggcgctgggccagggcacgggggtggcctgatggatacgccgatcgaacgcgccccgctggctcccgacctgagccaggcccgttacgccgtcgacctcaccggcctggtgccggcggaggtcgccgccgggctgccgccgctgccgccgaaccacttctatttctatccgccggacccgctgctggaaggcgacggcgcgatcaccgcgatcgaggacagcgaccccttcgaccagtacgtctaccgcctgcgccgggtgctctaccagggccgcacgcgctggcagaacgtgctgatcgccgacacctacaactacgaccgcgtgctgatgctcgacggcgcgatccagagcgccgagagcgatgagtcgctgtaccacgagctgctggtgcagccggccatgctcgcccacgacgagccgcgcgacgtactgatcatcggcggcggcgaaggcgccaccctgcgcgaggtgctgtcccatgccagcgtgcggcgggcggtgatggtcgatctcgaccgggagctggtggaactgtgtcgcgaacacctgttccagtggcaccagggcgccttcgacgacccacgctgcgaactgctcgccgaggacggccgggcctatctcgagcgcgacccgtcgctctatgacgtggtcatcatcgacgtcgtcgacatgctcgacaacggcccggcccaggctctctatacccgccagttctacgagctgctgcattcgcgcctgcgaccgggcggggtggtcgcggtgcaggggctggagttctcccacagcgacgacaagccccacgcggccctcgcccgcaccctgcgcagtgtcttctcccaggtccacagctaccgcgccacggtgccctcgttcctctcctcctggggcttcctgctggcttccgactggctcgacacgaaccactggcaggccgaggacatcgaccgacgcatcgaacgcaagctcggcccgctgtggctcgaccacctcgacggcgactacctcaaggcctgcttcgtgatggaccgggaaacccgcttcctgctcgcccaaccgggaccggtactggaagacggcgtacccttcgtcgcaccgccggatatcgaggagatcgagttcggcccggcacaattgccggccctggcgaggacctgaagatgtccgccgctcccctggccagcgtaccgctggccgtcaacggcgcgccctgcctgctgcaccgggtacgcttccgctccgccgcggacggcggcggcctgccgctgctggccaccctgcgcgatccgcagccggcgctggccgtcctggcgcaacgcatcgagctgagcgaagacgcggaactgccggagaccgccgtcgacgacgagctgctggtgatcttcgccaacgccgggctacagaccgggcacgcctggcgccagcgcctggaagcctggatggccgccggcgaggacgagcgccagccgaccctggaagcgccctcgttcggcgagcgggtgctgtggcgccccggccgcgcgctggtcatcggcaaccccgagcgctgccgggagctgctcgaaggcctggccgtcttcgcctggcacgaaggtcacctgcgccgcctggaaggcgagaccgcggcggcctgggaaccggcccaggccgatgtcgaactgacccagctaccgcgccgtgccgccctgcggcgccaggaacatgtgaaccggcaggtgcgacgcactacactctggcgcatggcctatgcccgcctggagtcgcacctggagaagccgccgctgcaactgaacggcgctgtgcgccggctctacaacgaactggccatgcaggccgaagtgcacgatcgcctggcgaccctggacgaccgcatcgaagtgctgcaggacctctacgaactggccgccgaccgcctcggcgaataccgctacttccggggcgaactgcgggtcgaatggctgatcgtcgccatcctcctgctggaggccggcctgagcctgtgggaattgtggaatcactgaaacgaggctgccatgagaatactgctggccgaggacgacctgctgctcggcgacggcatccgcgccgggctgcgcctggaaggcgataccgtggaatgggtgaccgacggcgtggccgcggagaacgcgctggtcaccgacgagttcgacctgctggtgctcgacatcggactgccgcgccgcagcggcctggacatcctgcgtaacctgcgccaccagggccggctcaccccggtgctgctgctcaccgcgcgggacaaggtggccgaccgggtcgccgggctcgacagcggtgccgacgactacctgaccaagcccttcgatctcgacgaactgcaggcacgggtgcgcgccctgacccgccgcaccaccggtcgcgccctgccgcaactggtgcacggcgagctgcgcctggacccggcgacccaccaggtgaccctgtccgggcaggcggtggaactggcgccgcgcgaatacgcactgctgcgcctgctgctggagaacagcggcaaggtgctctcgcgcaaccaactggagcagagcctctacggctggagcggcgacgtcgagagcaacgccatcgaagtccacgtccaccacctgcggcgcaagctcggcaaccagttgatccgcaccgtccgcggcatcggctacggcatcgaccagccggcgccctgaaaaccgcctaccggagtcccccgatgtcccgtgccgccgtcccctccgtccgccggcgcctgctggtcaacctgctggtcggcttcgtgctgtgctggctgagcgtggcggcgctgacctaccacctctcgctgaagcaggtgaaccgcctgttcgacgacgatatggtggacttcggcgaagccgccctgcgcctgctcgaccttgccaccgaagaccaggccggcgaggacggctccatcaccgagatcatcgaacgcagccgcgaagcgatccagggtctgcccctgctgcgccgcgaaagcgccctcggctacgccctgtggcgcgacggccagccgctgctgtcgagcctcaacctgccgccggagatcacggcccagggccccggcttcagcaccgtggaagcccagggcacccactggcgggtgctccagctgaacatcgacggcttccagatctggatcagcgaaaacctgatctaccgccagcacaccatgaacctgctgctgttctactcgctgttcccactgctgctggcgctgccgttgctcggcggcctggtctggttcggcgttgcccgcggcctggcgccgctacgcgaagtgcaggccgaggtccagcagcgctccgcgcgacacctgcagccgatcgcggtggaagcggtgccgctggagatccgcggcctcatcgacgaactcaacctcctgctggagcgtctgcgcaccgccctcgaggccgaacgccgactgaccagcgacgccgcccatgaaatccgcacgccactggccagcctgcgcacccatgcccaggtcgcgctgcgttcggaagaccccaaggcccacgcccgcggcctgctgcaagtcagtcgcagcgtcgagcggatcagcaccttgatggagcagatcctgctcctcgcccgcctcgacggcgacgccctgctggagcaattccacccggtcaacctcgccaccctggccgaagacgtactctccgaactggcgcgccaggccatcgacaaggacatcgagctgtcgttgcaccaggagaccgtgcacgtgatgggcatcgacctgtggctgaaggcgatggtcggcaacctggtgggcaacgccctgcgctacacaccggccgggggccaggtcgagatccgcgtcgagaatcgcgcccagcacgccgtgctgcgggtgcgcgacaacggccccggggtcgccctggaagagcagcaggcgatcttcacccgcttctaccgcagccccgccaccagcagcggcgagggcagcggcctgggcctgccgatcgtcaagcgcatcgtcgaactgcacttcggcagtatcggcctgggcaagggactggagggcaaagggctggaagtgcaggtgttcctgccgaagacccagccggacgcgacgcggccgccggccagaggtccggacagcgggcggtcacatatctgatagcctgcgcattggccgggaaagggataggctagcggcttcgcaacctcccaggagacccggatgaacatcggtgaagcggcgaagaaaagcggactgacgccgaagatgatccgttactacgagtccatcgagctgctccgcccagccggacgcagcgccagcggctaccgccactacaacgagaacgacctgcataccctggcgttcatccgccgttcgcgggacctcggtttctccctcgacgaagtcggcaagctgctcaccctctggcaggatcgccagcgtgccagtgccgacgtcaaggccctggcggcgcagcacgtgcgcgagctgaatcgcaagatcgaggagctcagcaccctgcgcgacaccctgcaggacctggtcgagcactgccagggcgaccaccgccccgactgcccgatcctcaaggacctggcgtctggctgctgccactgatatccagcagcggccagcgcgccgtccagttcttctcccgcaggcgccgccggtagacctccggcttgccggcgaaatgcgcggtgggccgcaccttcagcgccagcaggtcgtcgacgcccagcggtgccagtagctccaggcgttcgccgacgagccgcagcgccaccgccgtgcacgtttccgcccagtggcacagcgcatcggcgcaatcccggtagggccggtcgccgttgcgcaggtgcatgcgcgcctggttcttcaccgaccagggtgcctcgcagcgacggcgcaacgcggcctcgaagtcggcgtcggcctgcgggtcgagggcccgcggggcgaaatgaagtacgtcgatgtccgccagcggcgtggcttcgccgtagccatgcagatggtcccataccgcgttgcgcacgaagccggcgccgatccaggcgccctccgggccgacctcgcgcagcacgcggagcagatgcaggcgcgaggaatcggcggcgatcagcgcgaggatgtcttccgccgttttcatcccaaccgccgcaccggccaggcgaagcgtcgcagcaggctggccggcaacagggtgatggccagcccgacgaacaccagcgcgcaggccagcaggctgtccaggtcgaggcgttcgccgagcagcagccagccggcgagcatgcccgacaccggcaccgccagggcgaacggggtcaccaggctggccgggtagtggcgcaggaggaaactccagatggcgaagcccaccgtggtcgcgccgaaggcgatgtagagcagcgcgccgaagccgccccagctcatgttcagcacggcgcgctcgatggcttgcggaccttcgaatagataggaaagcgccagcagcggcaacggcgggaccaggctgacccagcagatcaggcgcagcatgtcggtggccccggaacgcttggtggcgatattggcgaaggaccaggccagcgctgcggcgaccaccagcaggaatgccagcaggctgtctcccagcggccgttccaggccgatcaggaccagccccgccgccgccagcaggaggccgaacaacccgcgcggcgtcggccgctcgcccagccacagggcggcgatgaggatggtgaagaatacctggctctgcagcaccagcgacgacagcccggccggcatgccttgggccatgccgacgaacagcaggccgaacttgaccaccccgaggagcacgccgatcagcaggatgcgtccgaacggcgccggcatcggcccgcgcaggaccagcagcggcagcgccgccagggcgaagcgcagggcgcagaacagcagcggcgggaagtcgccgaggccgaccttgatcacgacgaagttcagaccccagatcagggtcaccagcagggcgagcaggatatgtgcaacaggcatggcggcctccggaaaacttcaggccacgctagcagttgcgtgcgcaagggtcgcgatacagttggcgggaaaaaacatccgccagccgctcactgcaaccagggcggcggcggttcctcgcgctcgccacgcggcgcgtcgtcggcctggcgcagcgcctggcgacgcgcctcctcgcgctgcgcggcctcgatctcgcggagcaccgcgcgcacgtcggcggcctctttggcttcgacgaaggtgccgctgagcggggtttccgctgtcagttcgccggcttcgtagagcgcccacatttccttggcatagcgggtctgcctgagttccggggcgaagcggccgaagtaggcggccatgttgccgacgtcgcgttcgagcatgctgaacgcatggttgttgccggccgcgtcgaccgcctgcggcaagtcgatgatcaccgggccgtccggaccgagcaggacgttgaactcggagaggtcgccgtgcaccaggccggcgcagagcatggcgacgatctggcggatcaggaaagcgtggtggcgccgtgcctcgtcgggctccagcgtcacgtcgttgagacgcggcgcagcatcgccgtcggcgtccgccaccagttccatcagcaacacgccatcgaggaaatcatagggcttcggcacccgcacaccggccccggcgagacggaacagggccgccacttcggcattctgccaggcttcctcctgttcgcggcggccatacttcgagcccttggccatggcccgcgcctggcggctgttgcggaccttgcggccctcctggtactcggcggcctggcggaagctgcgcttgttggcttccttgtagaccttggcgcaacgcaggctgtcgccgcaacgcaccacatagaccgaggcttccttgccgctcatcagcgggcgcacgacctcgtcgatcagaccgtcttcgatcaacggttccaggcgtctgggtgtcttcatcggtgctacgcggttcctcggggccaatgtgtaaggcaaagggtctgacgttatacggcaaacgccgtgccgagcacagccggacgcgccggctttccgccggactgcgcaccgatcggcgtactaggccggtggcgcggtgagttcgatgctttccgccaccgcctgttccagccgctgcatctccacgtccagcgcctcggcgctgtcggcgtagcgccgggcaacctcggcgaaagcgtcggccacggcgacgaaggcctccaccagccgtgggtcgaattcactgccggcgccggcctggatcagcagcaccgcctcggcatgcgccagcggcggccggtaggcgtgccggctggtcagttcatcgtagcggtcggccagggcgacgatccgcgccgccaggggaatccgctcgcccgcaaggccttccggaaagccccggccatcccagcgttcgtgatgactgtaggcgatctgccgggcgaagcggaggaatccggaaggctggccgagccgccgctcggcgctggccagggcgtcgcgcccggcgcgggtatggccctgtagcagggcggtgtcggcggcgtccagttgcccggggttgagcaggacccggtcgggcaccgcgaccttgccgatgtcatgcaacagcgccgacttgctcagcaggtcgacagcctccggagtcagctcgtcggcgaacgcccgctgcgccgccaggtgctcggcgagcagcctgacatagcgctcgatacgcggaagatggcggctgcgcgggttgtcgcgaagatcgccaagggtcgccagggcttcgatgacggcgtcctgcaactgttgcagctggcgcgtgcgacggcgcacttcgagttccaggtattcgctcttgtcgcgcaggaaatcggcattggccttcaattgcagatgggtacgcacccgcgccaggacgatcggcgggctcaccggcttgcccaggtaatccaccgcgcccagggccaggccctgttgctcgtcgtcgcgatcggcgcgggcagtgaggaacatcaacgggatgtcgcgggtcagcggatcggccttgagccgtcggcagacctcgtagccgtccatgcccggcatgttcacatcgagcaggatcaggtccgggcgcggctcttcgacggccgcccgcagcccggccgggccgctgccggcggtgcgcacgcggtactgctcctcgagcagctcgcgcatcagcagcaggttgtccggggtgtcgtccaccaccagcacgagttcctgctcgggcctgtccagcatgctctccatcgcccctccggccttcgctacggggccgcctggcggcgaccgtcattccgtattgaagacgctggagacgacttctgcacgtccggtcaggcgcccggggcgaccgttcagggcgtcaggcggaaacgcagtggcgaatcctcggcctcggcgccgttctcgctctcgccgaaggcccggcgctcgatggggtcctggccgaaatactccttgatcggcgactcgatggccttgccgccggggctcacgtgactggcgcaaccgccaaggaacaccaggaccacaccgatgaccagcgctttcatcttcgtacccccgtcagcccggcccatccgggcgctgcgccgcagcatggcgcagcccgccttagggatcgcttaaggcattcaggcggcggcgcggctggcgcgccactggggcaggccgatgagcaccacggcgctgatgatcaccagcatcgccagcccctcgataccgccgatccgctcgccggcgaacagggtgccgagcaacaccgccaccgccggattgacgtaggcatagctggtggccgccgccggccgtacgttgcgcagcaggtactggtaggcgctgaaggcgatgatcgagccgaacaggatcaggtacaccagcgccagccagccgctggtgctcggccaatgctccaggcgctcgccgctggccaggctgccgaccagcagcaccgcgccgccgaccagcatttgcgcggcgctggccatcggtccggccggcagcgacaggcgccggctccacaccgagccgaaggcccaggacgcggcagcgaacaggatcaggccggcgccggcagggctggcctggaggttcgaaccgaggttgagcaggacgatgccgaacagcccgagcacgatgccgccccattccagggtggtgttgcgctggccgaacaactggctgaacagcagggtgaacagcggcaccgtagccaccgcgagggccgccaccccggaagacacgccccagtgctcggccaccgtcaccccgccgttgccgcaactgagcaggaggattccgacgccccccgcgccgcgccactcgcgccaggtcggcaacggcgcgccgcgccagcgcaaccaggcgaacatcaggccgccggcgatgacgaagcgcaccccggccatcagcatcggaggccaggactcgacgccgaagcggatcgccaggtaagtggagccccagatgaagtacagggcgaagaacgcaccgaaaagcaacagcggaaggcgacgggcaggcatggaaagcactcgacagggcaggcgggagaaagacttcattttatgaggtcgctacccgccggttaaggcacagccgctggttatcgggacgtaacacttttctttccatggaaatcggccatgctttccgtcgattcgacaaccgggacccatcatggacaaatacgaccgtgcgctcctcgccgccctgatcgacaacggccgcctgaccttcgccgaactggcccggcgcatcaacctgtcgcccccggcggtggccgaccgggtggccaagctggaggccgaaggggtgatcaccggctaccacgcctcggtgaacctggccaagctcggcctgcccatcgagtgcgtgatcgaactgcggatcaccgagaaggattgccagtcggtgctcgacgaactggcccggatcccccaactgaccctctgccaccggatcaccggcgacgcctgcgtgctgatgaaggccgccgtggcttcgatgccggagctgcaggacctgatcgaccggctgatgaagttcggcatcagcaagacctcgatgatcctctccacccccttcgccgaccgccagccggcaagcctgcgggggcaggacggcaatggcggatgtgcggcgtgagccctacgccggggttatccggcaggcgtcgggatccgtacttcatcgccgccacgaacccgaacggtagggcgcataacgccaacggcgttatccgccgcagcggcactcccggccgatagcggagccgccctcaccccaactctctccctgaagagagaggggattctccgtacaagcgtcgaattcgctgtctccaacgccgccgacgaacccgaaccgtagggcgccagcaaaaaaaaaggcggtcccgttcgcacggcaccgcccaagtcacggagttgcttacatcgtcgagcgacaaggccgctcgccctattggattaccgctcgatgatcgcggtcacaccctgcccaccggcggcgcagatggaaatcagcccgcgtccctgctccgccagcgagagcagcttggccaggttggcgacgatccgtcctcccgtggcggcgaacgggtggccggcggccagtgagctgcccttgacgttgagcttgctgcggtcgatggagcccagcggctggtcgaggccgaggcgggtcttgcagtactcggggtcttcccaggccttcagggtgcagagcacctgggcggcgaaggcctcgtggatctcgtagtagtcgaagtcctgcagactcaggccgttgcgtgccagcagccgcggcaccgcgtagaccggcgccatcagcaggccctcctggcgatcgacgaagttcaccgccgccgcctcgccgtccttgaaataggccaggatcggcaggccgcgcgccttcgcccactcctcgctggccagcagtaccaccgaggcgccgtcggtcagcggcgtcgagttggccgccgtgagggtgccgcgcgaaccgcgctcgaacaccggcttgagggtgccgatcttctccaggtcgatatccgggcgcaggttctggtcgcgggtcaggccgcggaacggcgtcatcaagtcgttctgccagccctcctcataggccgcggccagcttgtggtggctctcgaaggccagcctgtcctgctcgtcgcggggaatctgccaggtctgcgccatcagttcgcaggactcccccatcgacagcccggtgcgcggctcgccgttgcgcgggatggccgggaccacgtggcgcgggcggatcttcagcaggctcttgagcttgtccaggttgctcttgccgcggttggcctcgaggagaatcttgcgcaggccctcgttgaccccgatcggcgcgtcggaagtggtatcgacgccgccggcgatgccgctgtcgatctgcccgagggcgatcttgttggccaccaggatcgccgcctccaggccggtaccgcaggcctgctggatatcgtaggccggggtttccggggccaggcgcgaaccgagcacgcattcgcgggtcaggttgaagtcgcgcgaatgcttcagcacggcgccggccaccacctcgccaaggcgctctccgtgcaggttgtagcgctccaccaggccttccagggcggaagtgagcatctcctggttgctcgccgtggcgtacacggtgttcgagcgggcgaagggaatacggttgccgccgacaatggcgacccggcgcagctgggtcatggaagaactccttgctggaatcgtttacgccgagccgaggctcgacccgttaactgagcggtcagtggcgcacaggctaaccttagccggtcgcgtcgcattggccgccctgccgttatcccggtcagcgcggtcaattgcggcgaacaggtggctgcgtagagttgtccacactgttacccgcgttccctcggcatcgttggccggcggaatccaccttcagccttggagcctttccaccgggagcccgttccatgaccgatcgttacatcgccttcgccaactcccccgtcggccgccgcctggttggcgccgtcggccttccctccccgctgcgcctggagcgctggcaggccggccgggtgcggccggtggacggcccgctggtgatcggcgggagcggcgcgctggccgaggccgtgctgcccttcgccggcaagctgaccgacgcggtgttcgccgccgtcgacggacagttcgagctgccgcgctggaccgccgagcacagcccgcgggccaaggcggtgctgttcgacgccagcggcctgacccgcttcgagcagttggtggcgctgcgcgacttcttccagccggtgctcaagggcctcgacaagtgcccgaaggtggtggtcctcggacgcccccccgagtctctcaaggacccggtcaccgccagcgtgcaacgcagcctggaaggtttcacccgctccctgggcaaggaaatccgtcgcggcggcaacgtgcagttgctgtacgtcggcaagggcgccgaggaccaactggaaggcgcactgcgcttcttcctctcgccgaagagcgcctacgtctccggccaggtgatccgtcttgccgccaacagcgcccaggtccacgactggagcaagccgctggccggccagcgcgcactggtcaccggcgccgcccgcggcattggcgcggccatcgcggaaaccctggcgcgcgacggcgcggaagtggtgctgctcgacgtgccgccggccagggaggccctcgtaggcctcgccgcgcgcctcggcggccgtgccgtggctctcgacatctgcgccgcggacgccgggcagcaactggtggacgcgctgcctgagggcgtcgatatcgtcgtgcacaacgcagggatcactcgcgacaagaccctggcgaagatgagcagcgacttctggaactcggtgatcaacgtcaacctcaatgccccgcaggtgctgacccaggccctgctcgacggcggcaagctgcatgacaacggccgggtggtgttgctggcgtcgatcagcggcatcgccggcaacctcgggcagagcaactacgcggtgagcaaggccggcctgatcggcctggcccaggcctgggcgccggcgctgggcaagcgcggcatcaccatcaacgcggtggcgccgggcttcatcgagacgcagatgaccgccgccattccgctgaccatccgcgaggccggccggcggatgaactccatgagccagggcggcctgccgcaggacgtcgccgaaacggtggcctggttcgtccagccgtcgtccggcgcggtcagcggccaggtgctgagggtgtgcgggcagagcctgctgggggcctgaggcggcccctaactccccggcgacgggcaggcgccctgcaccaggaaaacaccggtagccccttcggacaggccctacccgcgcccctgctgcccgcgccggcggaactccaccggcgtctcgccgacccagcgcttgaacgcgcgatagaaggtgctcggctcggaaaacccggtgcgttcgacgatcacttcgatgcgctcgtcggtcttcagcagcagttccttggccagtcggcagcggtagtcggtgaccagatcgttgaagcgcaccccggccatcgccaggcgttcgcgcagacgtcgggccggcatgccgaggcgcgcggcgacctgctccagggtggcgcctccgtccaccagcaactcgccgatcagttcgcggacctggcgcaccaggtccaggcgctccacctcggccagttgccggcgcgccagcgactcgtgcatgcgcagcagttccggggcggcgtggcgcgagggtttgtccagcaccgcggcatcgaataccagcgcgtagcgcggcatgccgaggatcgtcgggcagccgtagaccgcacggtagcgctccatcggcgcgccggtttcgttcatcagttgcacttccagcggcttgaactcgccctcggtgagcgcgccgaacaggcggatcaccgcgccggcgagcatttccgggaagtggcggttgatcgccggcgattcgcccagcgacagcaccgcgcgctcgccctccacctccagttgcgcctgcagggtgtcggacagcaggcgtacgtagcgcagggaatggcgcaggccggcgccgaaggtatcgctggagaggaacaggtattccaggagcaggccgtggaacgccggcaggtgctcggccaggtgcaggccgacatgctcttcgccgcactcgtcggcggcggccttccagaacaggttctgtgcggaatgggggaaacggccggccggcaggccacccggcggcagcccgacacggaccaggacccggtccggatcgcagccgctggcgcgcagggcgtcgatcaccgggcgcatcagcgctacatcgtcggtcagatcacgcatggtgttttttctagttatccatggggcgggcccatcttaggcagctttgccatcccctctcaaggagaggccatagaaataacccatcccgcatgacggaaaaaccctcagatcgactagccgccggcgtggtcgaaaatctcgatgcagacgcatcccggagccgattgaccgccctgccagcggcgtcggccaggcggccaatgcctgctgcgggtgctcgactaagctgacagccacctatttcgaggagatgtccaatgcccaccgcctggctcgacctgcccgccccacccgccctgcccggcctgttcctgcgcgccgcactgcgccgcggcatccgcggcaaggccctgcccgagcgcggcctgcgcagccaggtcacggtggacccgaagcacctcgagcgctaccgccaggtctgcggcttccgcgacgacggcctgctgccgccgacctacccgcacatcctcgccttcccgctgcagatggcgctgctcaccgacaagcgcttccccttcccgctgctcggcctggtccacctggagaaccgcatcgacgtgctgcgcgcgctcggcggcctcggcccgttcaccgtgagcgtcgcggtggaaaacctgcaaccgcacgacaagggcgccaccttcagcatcgtcacccgcctggaagaccagcttggcctgctctgggtcggcgacagcaaggtgctctgccgcggcgtcaaggtgcccggcgaaattccgccgaaagccgagcaggagccgctgccgctggagccggtcgacaactggaaggcgcccgccgacatcggccggcgctatgcccgtgccgccggcgactacaacccgatccacctgtcggcgcccagcgccaagctgttcggctttccccgcgccattgcccacggcctgtggaacaaggctcgcagcctggccgccctcggcgagcgactgccagcctcgggctatcgggtcgaggtgcgcttccagaagccagtgctgctgccggccagcctcaccctcctcgccagcgcggcggcggcggacggccagttcagcctgcgcggcaaggacgacctgccgcacatggccgggcattggagccggctacagggctgacgccggtccgccatgccttgaagcttcgggcgcaaagcccgaagctatgcggctgcttaccgccaccgcgaagaatcccccatggacctgcacgaactcaccgcgcgcctgcacgccatccgcgaccgcaacgactggcgccaattccacagcccgaagaacctggccatggccgccagcgtcgagatggccgaactggtggagatcttccagtggctgacggaagaccagtcgcgcacgctgtcggccgagcagctcgaacacgctggccaggaagttggcgacatcgtcctttatctgctgctgttctgcggggaaaccggcctcgacctggaacaggtggtgcgcgccaagctggccgactgcgaacggcgcttcctgccatgagcgaccgccatttcgacgaactggcgacgcgcttcgccgaaaagatctatggcggcgccaagggtgcgatccgcctcgcggtactccaggccgacctcgccgaggccctcccggagcgacctctgcgggtcctcgacatcggcgccgggctcggccacatgtcgctctggctggccgctcgcggccaccgcgtaaccctcgccgagccagcgcaacccatgctcgacggcgcccgccagcgcttcgccgaagccgggcaggccgccgaattcatccaggcgccctggcaggaactgctcggccagctcaccgagccctacgacctggtgctctgccacgccgtgctcgagtggctggccgaaccccatgcgatcctgccggtgctgcaccaactctgcgcacccggcggctggctgtcgctggccttctacaaccgcgacgcgctgatctaccgcaacctgctcaagggccacttccgcaagctgcgcaaggaacgcttcgctggcgaggggcagagcctgaccccgcagcgcccgctcgacccgcgcgagctggaacaggcgctggcagcgcgttggcgcatcgaggcgcgcagcggcgtgcgggtgttccacgactacatgccgagcgagttccaggccaaggccgaacggctcgacctggtggaaatggaactggcctaccgccgccacccggcctttgccgggcttggccgctacctgcactggctgtgccgcccgcaatgaaaggcgcagaatgcagtctgagcctgcaagggccgccgacgtagcgcggccacggagcgtcgagcatgcaatcgcgactgttgatcctgccgttactcgccagcctagccgccctcggtgcctgccagggcgacaatccctaccgcgccagctctctgccctacccgccgcagccggccatcgcggccaatcccggcctcgatcccggcgcctatccggcggcgccgcgcgactacgcccgctaccgtagctggagctgggccgccgccggggtcagcggctttccccagggcctggacgacaaccagttgcgcgacgccgtcagccagcagctcgaccagcgcggcctgcgcccggcgcggccgggcagcgcggccgacctgcaggtcagcgcgttcctgcgcaacgaactgcgcacccgccaggtcaccgactactacggcggctactacggcaactacggcggctggcgcgatccctggtacggctatggcgccagctacccggtgacccgcagctacaccgtgcaggtcaccgtggtccgcgtcgagctgaacgacgcccgcagcggccagccggtgtggggcaacagcgccgagttcgactccggcgactccgccagcgaacaggccaaggccctgcgcgaagcggtgaaacgggcgctgtcgagctacccgccgggctgatcggcgagcacccggcggcggatcgcctccatcttcctgggcgagttgctcatcaccgcatcggcgcccagggcgcgcgcggtgcggtagtcctcggcggtctcgatgccgaacatcaccaccttcaccggctcgcggcgcacgcagtccatcgctttgcgcgtccacaactgcgccgccggcaccttgtaggaagactcgccaagggtgaagcgctcggtcaccgtcagttcgcggcgcagctcgatgcccatccaggtgccgccggccggcggtgcctcgcagcgctcgccgaaggccaggccgaccaggcggttgcgcgtcgcatcgcggctttcgaactgtcgcgcgcggtccgcgtagcgctgcgccaggtagtcgttggcggccttctcggtggaatagaaacgcacccgcgaccaggccttctgccgctccagctcgccggccacggcatcgaccagcggctccaccggcagcgacttcatgtcgaggaacaccggcacctgcggcgggatcgcccgcagcgcctggcgcagcataggaatccgcagcggcttctggcggtagggatagctgccgtcctcggccttgaacatatagccggcgttcaagcgcgccagctcggccaggctcgactggccgaccgcgccggcgccctgggtcaggaccgccaggtcagcggggcgatagagcaccggatggccatcggcgctcaactgcaccgacaaccatagcgcgtcggcgccgttgtccagcgccttgcggatcgccagcagggtgttctccgggtagtccgcggtgccggcgcgatgggccaccagcagcgggcccgggccatccgccggtaccaccgagcgtgcctcgacgcagccggtcagcgacaggcccagcagcaggatcgcaatacttcgattcatttcattctcccgtcgcgccctatagggcgggtgctcgccaacgttacttgtggagacgcttcaaacccgcgtttcctcttgcctttcatccggcgctgagcttggatgtgaactctgactggagaaaaaccatgatccgccgaatcctgctgctcggcctgctcctcagcctcgcagcctgcgaaaccacccagctcgaccgcgacttcgacagctcccgcgacttcgccgcctaccgtagctggagctggtcgcaacccgccttcgaataccgccccgacgacccacgcatcaagagcgacctcaccgagcaacgcatccgcgaagccgtcgcccagcagctcgaccagcgcggcctgcgtccggcccagggcaacgccaggggcgacgtcacggtgcgcgcctacctgatcgtcgacgatcgccaggaccagatcaccaccaactacggcggcggttactggggcggctactggggaggatactggggcggcccggcgatggccgagacgcgcaccgtgaattacaaggttgccaccctccaggtcgacctgttcgacggcaaggacggcaagctggtctggcgcggcagcggcgagcagatcatgcgcaccagcccgccgagcccggccgagcgcgagcaggcgatccgcgagacggtgcagaaagtcatgtcgcaatacccgccgcgctgacatgcagctcagccaccgcccggcggagaccggtgacctggagacggtcgccggcttcccccaggaccgcgacgaactcttctattgctaccccaaggcgatctggccgttcagcgtcgcccagctggccgccgccatcgccgaacgccgcggcagcaccgtggccgtgcacgacggacaggtgctcggcttcgccaacttctaccagtggcagcacggcgacttctgcgccctcggcaacatgatggtggcgcccgccgcgcgcggcctgggcgtggcccgctacctgatcggggtcatggaaaacctcgcccgcgaacagtacaaagcgcgcctgatgaaaatttcctgcttcaacgccaacgccgccggactgctgctctatacccagctcggctaccagccgcgcgccatcgccgaacgccacgatccggacggccggcgcgtggcgctgatccagatggacaagccccttgaaccctgacacccacgcccagcgcgtcctcatcatcgtctccagcggcccgagcaccccggcccgctgcgccgcgcccttccacaccgccaccctgctggcctgcatggacgccgaggtgaccctgttcctcagcggcgaaggcgtgcagttggcccgccgcgccgtcgccgaccagttgcgcgcgctggacggcggcgagccgctgcgccacttcatccgccaggcccgcgaggccggcgcgcgcctgctgatgtgccgccaacccggggtgaacatcgacgaaagcgaactgatcgaggaactcgacgaaatctccagcggcggcgaactggcacggctgatcctcgaatccgagcgggtgctgaccctatgagcgcgaacctgcacggcctggagttccccgacgggctgttctacgccccggactacaacctgtggttgcgcgaggaagtcgacggcagcctgaccctgggcctgagcgcctacggctgcgcgctgtatggcgaaatcttcgccttcacccccaagcgcgacggctggcacatcgaacgcgaccgcagcttcggcgtggtcgagttcgccaaggctgcctcctcggcccgcagcccgttggccgggaccctgctggcgagcaacccggcggtggtcaagcgcccggcgctgatcaaccgggattgctacggcgagggctggatggtacggctgcaaccggacgactgggcctcggcgcggggagcgtttctccagggagacgcggcgcgggaggcattcgccgagcgcatgcgcctggatgggttcgatccgcagcatccaggggtgcaggcgctggacgtctgagactcccgggttttacccgcaccccgctcgcggaaggcggataacgccgctggcgttattcgccctaccccagctctccatcgccgccaatctcccgcatatccccggagtccgccatgtcctcaccccaaccgccccgcttcgacggccaacgctggagcaacgccgacgacgaccgcatcgaggtgctgcctgccgaccccgcctggccacaacacttcgccgccgaagccgaggccatccgcacggcgctggcgctgcccgggctgggcatcgagcatgtcggcagcaccgcggtgcccgggctcgacgccaagccgatcatcgacatcctcctgctgccgccgcccggccacgatccgcagcggctggtagccccgctggagggcctcggctaccagttctggcgcgagaacccgaacacccagcggatgttcttcgtcaaaggcatgccgcccttcggccatggccgcacccaccatgtccatgtcatgcccctggcccaggccgaccgctacctgctgttccgcgactggctgcgcaaccaccccgacgacgcccgcctctacgccgaaaccaagcacactctggcccgccgctaccccaccgaccgcgaggcctatacccgtggcaaggacgaggtcgtcgcaaggattctcggccgggcgctggcggcgacgcggcacccaatgatacagagtggcctggtaaggggagaacgcgaaatgcacgccagggaactgcgtgaaacgctggtcgccggcgcggaatcgacgccaggcggccccgccgatacagcctatttcgagtcgctgcgcagccgggtaagcaagccccaggactgaggcggatagcgtgcttcgctcactactgcgactgtgcgagcacggcttccaccaacctctcgatcacctcccccaccctccccggctcgccaacctccacccagcgcaaatgcgcgaaccgcggatcctcgcgcaggccggtgtatttgcggcggttgcctgcgaaggtggtccatgaccagagcaggatcgaatccctggagcagaacgccatccgcagcgattcacggttgccgtgggacaggcgggtgcgcagcaggccccgggccagggtgcggcgaaggacccgggagaacaccgtccagcgcccgaaattcagccataccacatgggtggcgcggccccagagcaactcgcggacggcgctgtagttgccgtcgacgacccagcgcggcgccgtcgtcgcccgctccacggcgtgctcgaagcgttcgtggggcacggcttgccagccggggccccagtagagtcggtcgagttcgacatgcgtacaacccagcctggcggccagcgcggcggagaaggtcgacttcccggccccgctggtgccgaccaccaccacacgcagcggcgcgcctcgctcggcctcgacgcaggtcatgccttgaccgcgaccagcgtgtagcacatcgggatcgccagcggtccgtcctcgtagaggtcgtagagttcctcgcggttcgagtgcgggtactccttgaagtgactcaggcgcaggccggcgccgagcagcccgccgaggatgtcgccgagcgggtggacgtaccagtagctggcgatgccggtatcgctgccgctgccttcgtagacgatggcctcccgggatacgtggggcgtgtcggtgaagtagtcgttgcgcagttcgaacggtcgctccgactcgggttcgagcatctccaggaacgggtgggtctcatagatcgccaattgcccgcccggcttcagcaggccgctcaccgaggcgaagaagcgcgcgatgtcgggcatccagttgagcacaccgatggtgatcagcagcaggtcgaactgaccgttcagctcggcgggcagctcgtaggcattggcttcgacgaaacgcggctgatgcggcgagcgctcggccagttgccgcgcctgggcgaggaaggcggcggactggtcgatccccaccgcccgcgcgacgccgaaggcgtacagcgaaagcacttcccggccgttgttgcagccgacctggaccgccgccttgccggccaggtccagattgcgcagcacgccagccagggtctcgtccaggcaactgaagccggtttcctgtaccgccagcgacaattcctgccagccgctgccacgcaggtgactgtcggcggacgcgtcccaggcgcgtcggttgctttccaccgcgtgttcaagatccgtcatgcgaaaacctcagaagtgttcccaggaaggccagccgagtcgcgaacccgcagcccactcaatcgcggaattgcagcccgatatgggctcggcagtcgcgtcgttccaggctgccttcctggaaagcgccgcaggcgcggtttctcagaggcagcgtctgttccaccacggtcacccgcacctcgttcgccggttggcgctgctcggcgggtcgcggcgcctgacgccggccgttcaggttgtcggccccgcctggcgggatgcgccggcgcgtcgcggcgatccgcctgcatgctcaatagagaccggtggcgctgccccgctcgaacagcggcacctggttggccaggatcatgttgtagctgagcatgaacggcaccccgccgccgctttcggcgatctggcttacccagccgatggggttgttgaacagcgattcgtcggggctgagcacgccgacggcggcgctgtccgggtcgccgtcccaggtcacgtcgccccagtgccagccgaggccacgcacgtactgcgcgccgatcagcgcgccgagggcgaagaccgcctcgtcgtcgaggctgcgcccctgctccctcgcatcgcgcacgtagtcggtgacggcggcgacgatctgcgccggcgtctcgtccgcggcgacgccaagcaaggcgagcccctgtgcctgcagctccgccagttgctgttgcaggtccgttgaaagcggattgatctcggccatccctgttctcccgaggcaagcgtgcgcacccgtccgtcgggcgcgccatgaagcgcgttatcttacggcttcgcggcgacgaaagcgccctccccagccaaacgtagcgcagccgctaatcgcctcttcccggaaatgctgccttcggctctactggcgaatttgtgccatccatacccgagacagccccatgacgctgatcgccgccgcccagagctgcgcccaccccgccgacctgccacgcaacctcgacgaccacctgcgcctgatgcgtatcgcccaggcacggggcgtgcgcctgctggtgtttcccgaactgtcgctcaccggctacgaacccaccgctgccgccgccctcgcccagccggcggacacgcccctgctgcaaccgctgcgccagctcgccgagcaggcacggatgaccacggtggtcggcctgccgctgcgctcgccgaagcatgccaagccgctgatcgccgccctgatcctcggcgccgacggcagcctcggcgtctatgccaagcagcacctgcacgcgggcgaggaacgccacttctcagccggcgacggcggccccctgctggagatcgacggcctgccgatggcgttggcggtctgcgccgacttcagccaacccagccacccggcccacgccgcccgtgccggcgctcgcctctacatcgccagcgcgctgatcggagaaaacggctacccggccgactcggccctactggccggttatgcccgcgagcacggaatgggcgtgctgctggccaaccatggcgggccgacgggtggctggaaggcggcgggcaggagtgcgttttggaatgagcggggagcgctggtcagggagacgacggggacgggtgagacgctgcttctgctggaacggaccgagatagacgcttgatcctgtgagacacgatggccgccgaaagcgagcggagaattggcggaaggcagtgggagtcgaacccacccaggaacggctgccgtcccccaccggatttgaagtccggccacgccaccgggcgtgattgccttcctctttgatttgcaagaggttttcctcgagacgggagcttatcaggccggggtccgaagaagaaatgccggatgtcatggaaagtcgttcgcatggccgggcgagcagagcgtagcccagcctcggagcacttcacaggcgtttcaggcaatggcagtagacgaagtgctggacccggccggcgggagtgacgtggtgttcgtcgcggtgctcggtgagctggaaggcggagccgaactcggcgtgcagttcgtcggcgtcgtagcgcatgactggcaggccgctgcattcggtcgggccgtcggcggcgaaggtggcgacgatcacgtggccgccgtggcggaccgccttcatcacctggcgcacgtaggcgcggcgggcttcggcagtggtaaggaagtggaacacggcgcggtcgtgccagacatcataggtggcttccggcaggtcgacgccggtaatgtcgccggcgatccagcgcacctcttcgccgcgcgcgccgaggcggttgcgggcgacgcgcagggcggcgtcggaaaggtcgagcaccgtcaggtcgccgaagccttcggcgagcaggccgtcgaccagggtcgaggcgccgccgccgacatcgatgatcgccgcctcgcggggcgcgccgatgcgtcggatcaggtcgagggacagcgtggcctcggcctggaaccagctcaccgcgtcggacggcttgctctcgtatacccgttgccagtgctctcgttcggacatgacgaccttctccgtgttgcgctgcgacccattacccaccaagggcgttaacggcacattaacgccataggcggtgttgcgacagggccgctcctcaaccgtaggcaccgcgcagcgacatcacgccgcgccttcgcgccgcctggcggatcagcagttcgcccacggccagggccagcgccacgccgccgacgatcttgccggcgtaggcccagtccatcggcgcgccgggggtgacgacgaacaggcagatgccggccagcacatgcagcgcgacgaacagcgcccagagactggccaggcggtcgcccagcggcatccggtagggccgtggacgcgggtcggcgcggcgcaggcggacgaaggccaggcacatcagcacatagggcatcatgaaaaccatggcgaagatcgacagcagggtccagaacagttcctcgacagtgtgcgccaccaggccgtagagcagcagcaggacgatgctcaccgccgaggccagcaccgccgagccgatcggcgtgccgtggcgcgaatggaccacgccgaacagcgccggcagctcgccggccttggccgcttccaccgcggcacggttggtgcccatgctccaggtgaccatgttggtgaagagggtgaacaggacgaaggcgccgaccaggtcggcgagcatcccgccggcgccgtcgtggccgtagatgttgtagagggtatgggcgaagatccgggtgacgtcggtttcctcggccggtaccgcggccagcacgccgagggtgccgaagatgttgaaggcgccgacgatcagcccggagatcagcaccgcgcgcgggatgtcgcggcgcgcgttgcgcatctccgcggcgctgcaacaggccagctcggtccccatgatgccatagaccatcactcccagcgcggccatctggcccggcgaggacgggacgatggagtccaggctgaagtcgttggcgaagccatggttccagccgaagtgcaggccgccgacgcccagggcgagcaccgcgagcagcttgagcagcgcgccgaggttcggcagccacttgcccaggcgcagcgcgaccacgttgaacgccgcggtgagcagcgccagggctatgccgatggcgatcttgccccagaggctcagctcggggaaatagaaggcgccgagcatgctgccgaacagggtgtagaccgaaggcatccacagtgcgttgttgacccagtacatccatgacacccgggccccccagcggaagccgaaggcgctgcgcacccagtggtagacgccgccgttggcggggaaggcggtgcccagctcggaggtcatcatggccatcggcaggaacagcaggaccagcacgtagagccaccagaacaggctcgacggaccgagggaggaagccagggcgatctggtccatgaagagcatcgccgagaccgtgtagagcaccacatcgcgcaaccgcaggaccttgttcttgttgtcgtccattggggttctcctgaatgttcgggtggggcgccggcggcgccccggcgcttaccggtgaccggcgcggacaagatcctccacggtttcctcgatgctctcgcgcagcacccggaccacggtatcgacctgttcgcgggtgaggatcagcggcggcgacatcacgttcaggtggacgatcggacgaaccagcaggccgcgcttctgcgcccgcaggtggacccactcgccgatgttcaggctttccggaaacagcgccttgctcgccttgtcggcgacgaactcgacacaggccatgaagcgcatcccgcgcacgtcgccgacgatgggcaggtcgcggagactttgcaggcgctcctcgaagtagcggccgacctcgtcggcgtgggcgagcaagccctcgcgctcgatgatctcgatgttcttcagcgccgccgcgcaggccaccgggtggccggagtaggtgaaaccatggctgaagcagcggcccttgtccggctcggcgatcacctcccagatgcgccgggagaagatgcacgcgcccagcggctggtagccggaggtgaggcccttggcggtgaggatgatgtccggctgtacgccgaacaccgcctggctggcgaagaagtggccgaggcggccgaaggaggtcaccacttcgtcggagatgtacagcacgtcgtagcgctggcacagctcccacatccgccggtggtagcccgcgggcgggacgatcacgccgccggagccgaacaccggctcggagatgaacgcccccacccggtcggcgcccagttcgaggatcttgcgttcgaactcgtccaccaggccatcgaggaactcggcttcgcccactccttccggagcgcggtagtaatagggacaggcgaggtggtggatgcgctcgtcgaggaagtcgaactcggccggccggtcggcgctcttgccgcccagcgacatgccgaggaaggtcgagccgtggtaggcgttgatccgcgtgatgacgtgcttcttggcgcgcttgccgcggcagttctggtagtagtgcatgaggcggatcgcggtgtccacggcggtggaaccgccggtggtgaggaacacgtggtcgaggtcgccgggggccagctcggcgagcttgcggcagagttcgatggcacgcgggttggccatgtcgcaaaagggattggaataggccagcaggcgggtctgctcggccacggtgcgagccatttcctcgcgccccaggccgatgttggtgcaccacatgccgcccaccgcgtcgaggtagcggttgccggcggtgtcgtagatataggcgccgtcgccggcggcgatgttcagcgagccgttgacgcggtggtcgtcgaacacgtggtagccgtgcatgtagtgggcctggtcggcacggaccaggtcggcgtcgccgaggggggacgtggcgtgcagtcttgcgttcatcgggctgtcgctcttctcggatggatgctccgagggtgcaagagcaccgcgcggcgggccataccccattttggggtaagcgctgggtgcggccgacgcggcttgctatcctgcggcgacaacgacaagaacgagccgtaccgtccatgcaggccatcgccccgaacgcgctcgaccgctggcacgaacacctggcgctggcgatccggcgcctgcgccaacccgacttcctcgccgcgctggtcgacgccatccaccagttggtgccgatcgagtcgagcatgatcagcctggaacgcaagggccacgcgcccaccctgctctacgagcgcggcatcgccgagcgcttccgcgaggcgatcatccgccgctacttctcccgcggctacctgctcgaccctttctgcctggcggtggaggaaggccttccggaaggcttctacaccctcggcgagatcgcccccgacgacttcttccagagcgcctactaccagacctactacctcggcgccggagcggtggaggacgtctactacatcctcgacctcggccctaccgagaagctctcgatctgtctctacaacggcctttcggcgagccgctacagcgacgcccaggtcgccgccctcgccggcctggcgccgccggtgctggagctggcccggcagttctgcgccgggcgcgccgacctctcgccgaacccgcaggccgacctcgccccgcgccttcaggaagtgctgcgcggcttcggtcgcgacgtgctcaccgaccgcgaacgcgaggcctgccacctgctgctcagcggccactcggcgaaatccagcgcgcggctgatggacatctccccggagaccgtgcgcatgcaccggaagaatctctacaccaagctggaagtcggctcgcagtcggaactgttcgcgctgttcatcgagtgcctgagccaggggcagcgcgtcggcccctgagactcagggcgagacgccgccgagcaactgttcggccagcgccgagccctcgcgcaggcgacggtcgttgccgatgcggcgggtcaggccgatgcggtcgaagtgctcgaggatctggatgctgcgcttgcggccgatgcccaggcggtcgcggaattccgccgggcggatcagcccggcggggtcgcgcacctgcacggcgatctcggccaattgacgcagggtggcttccgggtagaacaggtcgcgcaccacctgctgcaactggcccaggcgtgccagcttgcgcagcaggttgcgcatgacggcttcatcctggcgcagctcgcgggccaggtcgcggacccagggcgggtcgtagcggccggcttcgagcagcggccagaggcgcgcgcgcagttgctcctcgctatcgctcaggcgcacttcgtggccgggcaggtgcagccagggcccgctgctgtgcacatcgccgccggccagggcggcgtcgagcagggcgatgaacaccggccgctccagctgcggcagggcgtagcgacgcaggcggtcgcggtcgggaccgagttcgtccggtagctcttcgtggaagcgccgcaggccggcgagcagttgctcgaccagggcgaaccagcgctccccggcgaacaaccgggggccgaggcgggtctgcacctcgaccacctcttccggcagccgccagtgctcgcgcgggcggttgaaggattgcaccaggcgttgcgggtcgaggccgttctcggccgcgccgagcaaggtcggcagcgcctcctccaggctttcctggcgcagcgcctgaagctgtgccagacgtgccggcgttcgtcggttgcgcgccggcgcggcgccgtcgagcacccgcccgccgccaagggtgcgctgcgccgactggtcgcgcagcaccaggcggtcgccatgcagggcctggatcggcgcgttcagcaccagttgggcgaaggcgcggtggccaggctccagttgttcgccttcgagcagggccaggcgcccggtgacgtcctgggtgcccaggtgcaggtgcaccggggtccagtgggtgaagtcgcggagttcgtcgggcaacaggcggaagtcgatgtcgacccgcgtggtcggcgcgtgcagcgcggcctgcagcagccagtcgccgcgctggatctgttccagcgcgaggcgctcgccggcgatgttcaaggccacgcgctgaccggcccaggcctgttgcgcgggccggttctgcgcgtgcaggccgcgcacccgcaccggccgtccggcgttgccgaggagcagttcgtcgcccaccgcgacctgtccggagaaggccgtaccggtgaccacgatgccgctgccggcgacgctgaaggcccggtccaccgccaggcggaagtatccctcgcggctacgctcgcggacttcgccggcgagcccgccgagtgcttcgcgcaacgcctcgacgccctccccggtgctgctggagagcgggaagatcggcgagcgcgccagcgggccggaggccagcaggtgttcgacctgggtccgcacctgctgcacccgctgcggctcgacccggtcgatcttggtcagcgccaccagcgcccggcggataccgagcagttcgacgatcgccaggtgctcgcgggtctgcggcatcaagccgtcgtcggcggccaccaccagcagcacgcaatcgatgccgctggcgccggccagcatgttgtggacgaagcgctcgtggccgggcacgtcgatgaagccggtggggctgccgtcgccaaggtcggcgtagagatagcccaggtcgatggtgatcccgcgttggcgctcggccgggcggcggtcgccctcgatgccggtgagggcgcgcagcagcgaggtcttgccgtggtcgatgtgcccggcggtgccgacgatcacgacagctcgctccgcagtcgcggcaactgggcgaggaacgccggctcgtcgtcgagctggcgcagatcgagccagagggcgtcgtcgtcgagccgaccgatcaccggcagcggcagcccgcgcagggcttcctcgaggttgcgcagggcgcgtccgcgcaggcgcctgggctgccgcggacgcaggcacagcgcggcgctggccagccgcgccaccggctgcgcgccgctgccgatcatgcccagggcgtcgaccacggcgacctcccagccctcgccgagcgcctcgcccagcgccggcgccagacgctcggcctgggcgcggatctccgccgccgggcggctgagcaggcgcagggtggtcaggcgttcggcgaggcggtccggatcgcggtacaggccgagcaccgcctcgagggcggcgagggtcagcttgtcgacgcgcagggcgcgcttgagcgggttcttcttgatccgcccgatcagttctcggttgccgaggatcagcccggcctggggcccgccgagcaatttgtcgccgctgaaggtaacgatgtcggcgccgtcggccagggcttcctgcaccgtcggttccttgggcaagccccagcgggtcaggtccaccagggtgccgctgccgaggtcttccagcagcggcaggccgtggccatgggcgatggccgccagttgcgcggtgggcacgctggcggtgaagccctggacgctgtagttgctggtatgcacgcgcatcagcaggccgctgcgcgggccgatggcggcttcgtagtccctggcgtgggtgcggttggtggtgcccacctcgtgcaagcgcacgccggcgcgggccatgatgtcgggaatgcggaaggcaccgccgatctcgatcagctcgccgcgcgagatgatcccttccttgcgcgcccccaggctgttcagcgccagcagcaccgccgccgcgttgttgttgaccacggtgactgcctcggcgccggtgagttcgcggatcagcccggcgatcaggtcgtcgcggtcgccgcgcttgccgctggccaggtcgaactccaggttcagcgggtagcgcgcggccagggtgatcgcctcgatggcctcgtccggcagcagggcgcggccgaggttggtatgcaacaccgtgccggtcaggttgaacacccgccgcacgcggctggcatgctgcgcggcgaggcgttcgccggcgcgcccggcgagcaccgcctcgctcagttcgatctcggcgagggcaccgcgtcgggccggctcgcgcagttcgtcgagcaggtcgcggagggtcgccagcaacgcctcgcggccgtagcgctggtgcaggggagcggccgccgcgctgcgcagcaggcggtcgaccgaaggcaagcgaacggaactcatggagaaaccttatccacagggtagggtcaccgacacgcccatcatagacgcgtcggcgcatgcccgcagcgtcttcggctattcgccgccgggggccagcaacaggttcggcgaacgccgcaggtagccgtcctcggccaggcgcatgtccagcgccaggctggccaggtcgtcggcaagggcatcggcgtggcggtcgaactccaggtagaactgcttcaggtagccctggcaactggggcaggtctcggcgcgcagcacggctttttccgccggctgcccgtcatgctccagggacaggtaggccaggtgcttgctttcctcgcagtggctgcacttgatccgcacgtagtgccattcgcaggcgcacagcgagcagctcaggtagcgcagaccggtttccttgccgccctggcggatcatcccggccatcggcggcgagccgcaggcggggcacagggtccggctctcggtctcgaccaccgcgccctcctccagtcccagcagccaatggctccaggctacctgcagggcggcgccgaggaacggcaccagggccgccggcaggaggtcgaactgaccgctgagcaaggcgatggcccaggccttgcgctggccttcgtcggcttcgcgcaattgttcgagtgccgcgccgacggcggcgttggccggtgccgggtagcccgcgagcagggcatccagccagggcagccaggcgccttcgcgcaccagcaggtcgtaggccagcggcggcatgccgtgctcgcggctcttgcgcaggcgctcggggtcgagcggggccagggccggcgggttgtccagcagcgcctgctggagccggcagagaccggcgaccagccgcaggtagtcgcccatcgggtgcccctcggccagttgcagcagacgctcgccgcggcgggcgaacaggtcgcgcgacggctggtgcaggtgcgggggaatgttggcggcggcttcgatctgccccggctgaagaatggtgcgtgacacgggaactcctcgggtctgcgccggcgggccggtgggccgcgccgcaacgatcgggcgcccggtggggcgcggaatgaatgcaaaggccccatcgctggggcctccggtcgggcgatggcgacactatacgcgtcagtgctcctcgcccttgccgacttccttcagccagccgttatggtgcttgcgcgcccaggcgcggctgaccttgccgtagagcatcgcgcccatcgagcccttgacccagatgccggcgtagatatgcacgatgatgctggcgatcaggacgaaggcggcgaaggcgtgcaggagcgccgacaggcggatcgcctcgatgccgaaccaggcgctgaagtactggcgccagatcacgatgccggtgaccagcagggtcagcatgctcagcagcagcacccagaacaacagcttctgcccggcgttgtagcggccgacttccgggaggttctcctcgcggttgctgaccacgtcgcgccactgcttgagccactggatatcgctcttctgcacccggttgtggtgggcgaagcgcaccaccaggccgaggaagaagacgaacatcgccagccccaggaaggggtgcaggatacgcgtccagggaccgccgccgaacaggttggtcagccagaacagcgccgggtggaacagcgccagcccggacaacccggccatgaagaacaggatcgccacggcccagtggttgctgcgctcgttggcgttgtagcgctggatttcatttttcatttccgactcctcgagagcgccgccgctgccgccgggtcgcggaggaccggcggcaacgcccgcgcgcaggctcaacgacgctcgtgcgggtcaaaggtgtgtaccgacggatcgacctggtgcaccggtgcctcggcttgcccgtggtcttcctcgtcgtccgcgcggttgggaccgacgcgcacatagtggaagaacccggcgagcaccgtggcgcccatggccagcagcgccagcggcttggtcacgcccttccacaggctgaccagcgggctgacgctcggctggtcggccaggccggcatagagcgacggcttgtcggcgtggtgcagcacgtacatcacgtgggtgccgcccaccccttcggggtcgtacaggccggcgttctcgtaaccgcggctcttcaggtcgacgatgcgttcggcggcgtgttccttcatgtcctccttgctgccgaagacgatggcgccggtcgggcaggtcttcacgcaggccggctccatgcccaccgagacgcggtcggaacacaggctgcacttgtaggccttgtggtccttctgcgagatccgtgggatgtcgaacgggcaaccggtgatgcagtagccgcaaccgatgcacttgtcctggttgaagtcgacgatgccgttggcgtacttcacgatcgcccccgggctcgggcaggccttcaggcagcccggctcggcgcagtgcatgcagccatccttgcggatcagccactcgaggttgccggcctcgttctcgtgctcggtgaaacgcatcaccgtccacgagtcggccgtcaggtccatggggttgtcgtaggtgccgtggttgtggccgacctcgtcgcgcagctcgttccattccgagcaggcgacctggcaggccttgcaaccgatgcacttggacacgtcgatcagtttcgccacttcctcctggttccgcaccgagggcatcggcgtggtggtcgcggagcgggcgtggatgtcctgactactcatgtttcacctcacgccttttccacgttgaccaggaacgacttgaactccggcgtctgggtattcccgtcgcccacgaagggggtcagggtgttggccaggaagccgttgcgcgccatgccggcgaagccccagtggatcgggatgccgacgtggtgcacggtcttgccgtccacctgcagcgggcggatgcgcttggtcaccaccgccaccgccttgatgtagccgcggttggaggagaccttgaccttgtcgccggcattgatgcccagctccttggccagcgcctcgccgatctcgacgaactgctcgggctgggtgatcgcattcagccggcagtgcttggtccagtagtggaagtgctcggtgagccggtaggtggtcgccgcgtaggggaactcgtcggccgtgccgaacagttccatgtcgttcttgaacacccgtgccgccgggttgctgatcgccttgcggttgtcgcggtgcaaggggttcaccccgatcggcgtctcgaacggctcgtagtgctcggggaacgggccttcggccatcttgtcgacggcgaacaggcgagccaccccttcggggttcatgatgaacgggttcatcccggcttccggcggtacgtcggccttgtagtcgggcacgtcggtgccgccccaggacttgccgttccaccacaccaggcgcttcttctccgggtcccacggcttgccgctgacgtcggccgaggcgcggttgtagagaatccgccggttcgccggccaggcccaggcccagccgagggtctggcccatgccgtaggggtcgctgttgtcgcggcggcccatctggttgccctgctgggtccaggagccggcgaagatccagcagccgctcgccgtgctgccgtcgtcgcgcagcagggcaaagcccggcaactgctcgccggccttggccaggatcatgccgttggccgggtcgaccaggtcgctcagggccttgccgttgaactcccgggccagttcgtccgggcccggttcgtcgggcttgaggtaggaccagtcgaggccgaggatcgggtcggggaaggccccgccgtccttgcggtacatctcgcgcaggcggtggaacagcccggccatgatggcgatgtccggacgcgcctggcccggcggctcggcgcccttccagtgccactgcaaccagcggccgctgttgacgatcgagccgtcttcctcggcgaagcaggaggtgggcaggcggaacaccgtggtcttgatgctggcggtgtcgacgtcgttgtactcgccgacgttgcgccagaactccgaggtctcggtcaccagcgggtccatcaccaccatccacttcaggcgcgccagcgcggcgccgaccttggccttgttggggaacgaggcgatggggttgaagccctggcagaagtaaccgttgaccttaccctggtacatcatgtcgaagtagcgcagcacgtcgtagccggcgcccggcatgtcgagcttgggcagccagtcgtagcaccagttgttttccttggtcgccgacttgccgaaccaggccttcatcaggctgacgtggaacttgccgtagttctgccagtaggacagctgtcccgggcgcagcggcttggccgtgcgcttggcgatgtaggcgtcgtagtcctgctcggcgtccatcgccagggtcaggtagcccggcagcgagttggacagcaggccgaggtcggtcaggccctggatgttggagtggccgcgcagggcgttcatgccgccgccgggcatgccgatgttgcccagcagcagctggaccatcgcgccggtgcggatcatctgcgcgcctaccgagtgctgggtccagcccagggcgtacatgatggtcatgaccttgcccggcttggaggtctcggcgatttccgcccagaccttgagcatcatgtccttcggcgtaccgcagatgttgctcaccacgtccggggtgtagcggctgtagtgctgcttgagcaggttgaacacgcagcgcgggtgggtcagggtcgggtcgaccttggcatagccgtcctcaccgatctcgtagccccaggaggacttgtccgggtaggtccgcttctcggcgtcgtagccgttgaacaggccgtcctcgaagctgaagccttccttcacgatgaacgagacatcggtgtagttgcgcacgtattcgtgctggatcttgtcgttttccagcaggtagttgatcaggccgccgaggaaggcgatgtcggtgccggtccggatcggcgcgtagtagtcggcgaccgaggcggaacgggtgaaacgcggatcgaccaccagcagccgcgccttgttgtgcgccttggcttcggtgacccatttgaatccgcacgggtgggcttcggcggcgttgccgcccatgatcagcaccagatcggcattcttgatgtcggtccagtggttggtcatggctccacggccaaacgtcggggcaagacttgccaccgtcgggccgtgtcagacacgcgcctggttgtcgaatcccaggatgccgagggagcgcatcaccttgtgggtgatgtagccggcctcgttggacgaggcggacgcggcgaggaagccggtggtcaaccagcggttgacggtctggccctgctcgttcttctcgacgaagttggcgtcgcggtcttccttcatcagcttggcgatgcgctcgagggcttcgtcccactcgatgcgcttccactcgctggagccggcctcgcgcacttccggatacttcaggcggttcgggctgtggatgtagtccagcaggccggcgcctttcgggcagagggtgccgcggttgaccggatggtcggcgtcgccctcgatatggatgatgttctgcgcgacgttcttggcgccgtcgccctggctgtacatgatcaggccgcaaccgaccgaacagtaggtacaggtgttgcgggtctcgaccgtgtgcgccagcttgaagtggcggacctggtcggcgaaggcctccgtgggggccatcccgagcgccgcaaggctcgatcctccaaggcctataccgcagaccttgaagaattgccgacggttcatatccatcgtgcatctcctgcatcaggcaaaggacacccgggacatggccggatgtctctggttaaaagatagccagcctggcgaggtacgccagccgggcatggctacggggcagcgaaccctacacgaacgctgggtttttctgccttgaccggagtcattacacggcggcgcaaaccttgtccagcaaggtgcgcggaatcgggacaggtccgaacgccgcgaggcgcgcgaacaggaggtgatatccaggtgccattagaccaaagactaatgccgggtcgcctagggctgcggcgacccggcgagcggatcagagtccgacattcctgaggcgattggcatgctgccgatagacctgggtcgggtcgctctcgaacaggctgaccaggccgagcaactggttgacttcgtccagatggtccatccggtagttgtccttcaccacgctgcccaggtggctggagcattggccgaccagaccgtcgttggcctcgccgaacagcagcccggtcaccgccaggccggcggagctcgggtcgagcgcattggtcagggagccggtgccgctcatcgagtagtagcgcaccccggctaccgtctccgcgccctggccacaggcgctggccgggatcgcctgcgggaagcgctggttgaaccgcgcggtgccgggagtgttgagactgttcagggcagccagcgcgtcgcccttgacccactcgccgccgtcgacgatgtcgaccaccgagaacagcgcctccaccgccgaggcgatcacctcggtgccgatcggcccgaggaactcgctgaagccggtcaccgcgtcggctaccggcgtgcccttgtgcggcgtgcccatggtggtgaccgaggccaccagttgcggcgccaccccggcgacgtagcgcacggtcatgccgccctggctgtggccgatcaggttgactttctccgcgccggtcagggccaggacttcctccacctgcgccagtagctgttcgccgcgcacctcgttgctgttcaccggcgactgcgaggtggcgaagaccttcgcgccgtccttctccagggccggcacgatagcgtgccagtagtccaccgggccgacgctcttgaagccgaacagaccgtgggacagcacgatgggatagcgcgtgcgggtgtagtcggtcgcagcgtgcacgggaaggctggcggccagcgctaccagcgccgccgcgaggaacgtcttgttcttgttcatcgtcgagactccgttcggattggacaggcagttggcaaggcacgtgctgggcgggccggaaccccagcctgacagcgccgccaaaggcgtcgagccgtgcttaagttgggctcccggcgcacgccattaccccgggtaacagcgccgccgttcccattccgcccgccgcgccgcaagtgctgtcggagagctttcgacgcctgtcacccggggccacagcggtgcagcgcagcgagcacctatccgatcagccagtccgccggcttgaccgaaatgcctggcggttccggcaagcgggccgcattcggcggcggcgcaacttcctatggtgaagcgtccctggctaccggaaccgcgccatgcgcaacccctacccgccgctcgccgccgctccctatccgcacctgctggccccgctggacctgggcttcacccgtctgcgcaaccgcgtggtgatgggttcgatgcacaccgggctggaggatcgtctgtgggacttcggcaagctcgctgcctactaccgcgagcgctcccggggcggcgtcgggctgatcgtcaccggcggcttcgcgccctgccgcgaaggttggctgctgcccttcggcagcagcctcaccagcgccctggaggtgcccgcccatcgtcgcctgacccaggcggtgcatgccgagggcggcaagatcctgctgcagatcctccacgccgggcgctatggctaccacccgatggcggtgtccgcctcgccgttgaagtcgccgatcagttggttcaccccgcgcgaactctccgagcgcggcatccgcaagaccatccgcgccttcgtccgttgcgcgcggctggccaaggccgccgcctacgacggcgtggaagtgatgggcagcgaaggctacctgctcaaccagttcctctgcccgcgcaccaaccgccgcgacgaccagtggggcggcccgctggaaaaccgcatgcgcctggcgctggagatcgtccgcggcatccggcggatcgtcggcgaacgcttcatcctctgctatcgcctgtcgctgctcgacctggtcgagggcggcaatacctgggacgaagtacggcgcatcgccctggccctggaggaagccggcatcaccctgctcaacaccggcatcggctggcacgagtcgcgtgtgccgaccatcgtcacctcggtgccgcgcgcggccttcgccgaggtcagcgcacggctgcgccacgaactgaaggtgccggtgatcgccagcaaccggatcaacaccccggaggtcgccgaatccctgctcgccgccggcaaggccgacctggtatcgatggcccggccgttgctggccgacccgcagttcgtggccaaggccggtgccggccgggccgaggagatcaacacctgcatcgcctgcaaccaggcctgcctcgatcatgccttcgccaaccgccgcgccacctgcctggtcaacccgcgggcggccttcgagaccgagttgcgctaccgcaaggcgcgcacgcagaagcgcatcgcggtgatcggcgccggccccgccgggctctccgccgcctgcgtggccgccgagcgcgggcatcgggtcagcctgttcgaggcgagcggggaaatcggcggacagttcaacctggccaagcggattcccggcaaggaagagttccgcgaaaccctgcgctacttccgcgtgcgcctggaacgcctcggcgtcgacctgcgcctcggccaccgggtgtgccagggcgagctggacggtcagttcgacgacgtggtggtggccaccggcatccagccacgccggccaaggatcgacggcatcggcggaccgaccgtactcagctacgtggacgtgctgcgcggcgcgccggtgggcgcgcgggtcgccatcgtcggcgccggcggcatcggcttcgacgtcgccgccttcctcgtcgccgcgcccagcgacggccagccgcgggcgctcggcgaatggctcgcggaatggggcgtggacctcgacaatagccagcccggcggcctccgcgaacccgctccgacgcagccggcgcgccaggtctggctgctccagcgcaagcccggcgcccccggcgcgcagctcggcaagaccagcggctgggtgcaccgcgcgcacctcaggcacaacgccgtacggatgctcggcggggtggagtacctgaagatcgacgaacgcggcttgttgatccgcgtcgacggcgaggaacgctggctggaggtggacaacgtggtgatctgcgccggccaggagccgctgcgcgagttgcagatcagccaggcggcggaaagcctgcgcttccacctgatcggcggggcgcgggtggcaggggaactggatgccaagcgggcgattcgcgagggggccatgctggcggcgcgcttgtagggggacaacgccgctggcggcatggcggccgtagggcgaacaaccgctcgcggttacccgccggaggaatccgagggcgtgcgatggggcctcgcgttttcctcctccgctcccgcctggtgcatactgtgcgactccccgtaccactccggcccgtccctcgccatgcgcggggcgcgctcgccgtcatcgttccaggagtcttgcatgcccactcccccctggtggctgttcgtcctgcccctgctcgccggcgcctgcctgccgctgcaggcggggatcaacggccagttggccaagcaggtgtccagcgtcctcgccgcggcactgatctcgttcttcgtcggcaccctcgggttgctcgccctgaccctctcgcagcgcgagtttcccggcctggcggcattgcgcgggctgagctggtggcactggtgcggcggtttcctcggcatgttcttcatcttcatcgccgccttcgccgcaccgcgcatcggcgcgctgatgttcatggtgctggtgctcgccggccagctgggcatggccatgagcctcgaccacttcggttgggccggcttccgcgaggcaccgatcagcgcgctgaagctgggcgggttggcactgatcggcgccggcatctggatgatccgcaagggctgagtgcgtcttgccgcggacgcgtcggccggcctatagtcggcctcggcgttctccacgcctcccgtccgcggaaagggcagcgcccaggcgatccaccccaagcatcgcgcatgcgactccaggcctgatggcggacaaggctgcagaggagatcgtatgtccttttcccgcactctcggcgacggccggatcaatctcgaacagcaacgcaagcgcgccaaggagctgttgcgccagtggcgccgcgacccggccagccgtacagggcttccggggcaggcgccgcgcctggccgacgcccagtggcaggtggcgcgcgaactgggcttcgccagttggccgcgactcaaggcgcatgtcgacgccatcgccttcgccagccgccaccccgatctggtcggcggcgatgaggccgcgaccctgcacctgcgctgcggcaacgacatcgcccacggcctgaagctcgccggctttcgcggcgacttccggatgttcgccgacccgctgaccatgggaccggtgccgaacctgccgttgcccgagttcctcgccctgcgcagcgactacctgagccgcgccttcgacctcgacccggccgacgcccaggcccgccagcgccaggaatacgccgggctcgagcggctcggcgaatactcgcgggtggcgctctggtgcgaggcggatgcctacgaccagttgttcctggtccgggtgctggcaggaatgcagacgccgccggagcacctggaactgatcgagatcgaccgcgtgccaggcgtcgagcgcttcgtcggcatcggccaactggcgcctgagctgctcgcctggctatggacccagcgtcgcccgctggacgccgaagccctggcgctggcccgcgcggcctgggacgcctaccgcgatccggcgccactgcgctgggcgcaactggccgccgcgccgaccccggcgctaccgttgctggggccggcgctgcgtcggcaactgcatgaactgccggccctgcgcgacggcctgtcgctgagcgaacggctgaccctggagatcgtccgcgacggcgagcggccgagcgccggccaggtcttcgccgagctgaccgcacggcgcgagccgctgccctatctcggcgacctgatgttccgcgtcctgctccgcgcgctgctggaagagcccggcgcgctgctgcgcacgccggcgccggaactgccctgggaacgccagccgctggccctgaccgctgcgggccgcgaggtcctggccgggcggcgctaccgcctcgacctcggcgcccccgaacgctgggtcggcggcgtatgcctgcgcgccggcaccgcgcactgggcgctggacgagcaggaccggccggtatggcgggaggacccacggcactgacgctcatcgcccggacgagcgcaacgggcgcgcagccactatcattgcgcgcccgttttccccgcacccgcccgccgatgaagaaaatcccgctcgccgccgccgaccccgaccgcctggatacctgggtgaaataccgcgaaggcctgtgcggcgagtgcaacgcgacctgctgcacgctgccggtggaagtgcgcatcgacgacctgatccgcatgcgactggtcgacgagttcgagcgcgaggagccggccaagcgaatcgccaagcgactggaaaaggatggcgtgatcgagcacttcaaccacaagcgcgagatattcaccctcacccgcatggccaacggcgactgcctgtacctcgaccgcaagacccgcctgtgcagcatctatgcccgccgcccggacacctgccgcaaccacccgcgcatcggcccgcgtcccggctactgcgcctaccggccgaggtagtctcagccaggcggcgccacgccctggcatagctggtactgtcccaccggcggccggcagcgcaagcgctggcgcacctcgtcgggcaaggcgccgaacgaacgcgagcggatcgccagcagggcgtcgcgacgcaaccagccggccagctcgctgtcctccgcccgttgcgcccgcccgccgctgtagaacactgccgagtacggccgcttcggccagaacaccagcggccgctcgcgccagccggcgtcgctggccagcagcgcggcggtggacttctgctcggcgcgcgagcccagcagcagggagccgaggaacagcgcgaacagcaatggggtcagtgccaggcaagccaacccgccacgccgcagccaggcgctgcgcgccagcggcgcgcgcagcaggtcggcggcgagcaacgccagggccggcaggccgggcagcacgtaggtccagaggacgttgccggcgaaggtgaagaacaggcacggcgccagtccccagaacagccagtagcgcctgcgcgaggcgacgccatcgaccacctccccgcgctggcgccagcccagccagagcagcagcggcagccagaggctccagggaaacgcggcggccagcaggaacagccagacgctgccgtagggataggcgtgggcattgccgtaacggtcgccgtcccagccggcggtgacgaagcgctgccaatgctcgccgagcaggaagtactcgaggaagcccggcgtcttcaactccgccagcaggtaccagggcgcggccaccaggagcatcagcaggcttccgcggatccatggcaggccccgccagagcgcgcgccagcgccactccagcaaggtccacaggccgatcggcagtccggcgaggatcagcgtcagcggccccttcgccagcagcccgaggccgaggccgaggaacatcagccagccctcgcggcgccggattccctccgcgccatgcaggcccagccagaagccgcgcatggccaggaccagcgccagggccagggccatgtcggtcattaccgccccggaggcgacgaagaacagcgccgaactgcccagcaggacgcaggcgatccgcgcctgccgacgatcttcgcgagcctgccagtcccataccagccacagcaccagcacgcccagcaaccagtgcggcaggcggctggcgaactcgttggcgccgagcagaagctggccgccggcgctgagccagaaggccagcggcggcttgccccagaacggcacgccgacgtcgtaccagggcgtgatccagtcgcccagttcggccatcttccgcgccacctcgccatagcgggcctcggtggtgtccatcagcggatagctgcccaggctcagcaggcggatggcgaaggccagggcgagcaggaaccaggccagcggccagccgcgcagcgccctcacggattggccccgccgacctgcgccggcaggtagcggtcgatcaggtagagcgggcggcgccgcgcttccatggtcatccgcccgaggtattcgctgcacacgccgatggccagcagttgcaggccgccgatcaggaacagcgcggcgatcaccggccagtgttcgtggatctcctgctggccgaagatcccggcgagcagggtcgccagggccgccaacaggctgagcaggccgaggtagccggcgaccttcagcggcgcggtggaaaacccggtgatgccttccagggcgaagttccacagccgccagtagcgccacttgctgtggccggcgacgcgggcggcgcggctataggcgatatcgacctggcggaaaccgacccaggcgaaaagccccttcatgaagcgattgccttccggcagctcgcaaagggcatcgaccacccgccggtcgagcaggcggaagtcgccgacgtcgcgcgggatcggcacctcgctgaggcggttgatcagccggtagaaggcgctcgccgaggcgcgcttcagccagctttcgccggcccggctgcggcggcgcatgttgaccatttcggcgccgccgatccaggcgtcgagcatctgcgggatcagttccgggggatcctgcaggtcggcatcgatgacgatcaccgcggcgccgcgcgacagcttgagcccggcgctcatcgcctgttccttgccgaagttgcgggtgaagcgggccacgcccacccggcggtcggcggcctgtagctgggcgaggatcgccgcgctgcggtcggtgctgccgtcgtcgacatagagcacctcgcaatcgtcgccaaggtcgccgagcacggcgcccaggcgctggtggaaggccggcagcaccgcctcctcgttgaacaccggcactaccacgctgagcaggcagggggcctcgagcttcgacgccagggaaggttcgatcatcatgagaaggtccagagtcgatgaaggtgataggtcgccaacagcagtgcgccggtcgcggcgagctgggccaggcggtagtcgagtccggcgaggtcgccgagcagcaacaccaggacggcgttgccgagtacgcaaagcaggctgacggcgaagaagcgcggcagcgaacggaacaccgggccacggtggcggaaagtcttccagcgatgccccaggtaggcagccagagccccgcagcctgctcccgtcgcggcggccacggcggcgccgacggcgaagccctcgaccaggagggtcagcaccaggtaatgaacggcggtggcaccggcgccgaccgagacgaaacgccccaggagcatgcatggcttcctctggaaacaaccgacgccggcattctaggaaggtgcgcaaagccccgcggttagcgctgcgcaagcttcctgacaggttttcgcagggttccccgcggcaggcctggaagccgcgtcggacaaggaatacacggcaggcagaggtctgttaccggatatgaaaaacgggttttccgcaggcctcgccgccgtcgctatactgcccggccgatccggaggaccccatgagcctgttgcgcgatgcctggcgccacgccccgacccaccacagggtctgggcgctggccgggccgatgattctgtcgaacgtttccgttcccctggtgcacctggtggacagcacggtggtcggccacctgccgcacgcctaccagctcggcgcggtagccgtgggcggcagcctgtacaccctgatggtcggcgtgctcggcttcctgcgcatgggcaccaccggcttcgccgcccaggccgccggccgcgacgatggcggcgcgctgcgcctgatcctcgcccagggcctgggcatggcgctgctcctggccctgctgctcggcgcgctggccctgcccctgagcggctgggccctgcaactgatgcaaccttcggcggaactgaccggcgaggcccgcgccttcttccatacccgcctgctcggcctgccggcggccctggccagctacgcactggtcggctggttcctcggcacgcagaacgcacgggcgccattggcgatcctgttgaccaccaacctgagcaacatcgccctggtgctctggttcgtccacggcctcgactggggcgtgcaaggcgcggcccgcgcctcggtgctggcggaatggagcggcgccctgctcggcctggccctgacccgccgcgacctggcccggcgccccgggcgggcgcagtggcaacgcctgcgccactggctgtcctggctaccgctgctgatggtcaaccgggatatcttcatccgtagcctggccctgcaactggtgttcttcctgctcaccgtacagggcacccgcctcggcgacgccacggtagccgccaacgccctgctgctcaacggcctgctcctgacgtcctacgccctcgacggtctcgcccacgcggtggaggcgctctgcggccacgccatcggcgcccgcgaccgaaccgccctgcgccgcgcgctggtggtggccggtggttggtcgctgctggcaagcctggcgttcgccgcgctgttcgccttgttcggccacctgttcatcgacctgcagagcgacatcgccggggtccgcgaagtcgcctacgcctatctgccgtacctggcctgcctgccgctgctggggatgtggagctatctgctcgacggcctgttcatcggcgccacccgcgcccgcgagatgcgtaacgcgatgctcgtcgcggtggccgccagcctgcccctcggctggctgttgcaggggctgggcaaccacgggctatggctggcgttcctcgccttcatgctgctgcgcgggctggtcctggccgcctacggctggcgcctgacccgccgcgatggctggttcgccgctcagggcgccgacagcgggcgataggcgagcatcagcgggacgtcggcagcgtgcgcgacctgtaccagttcgctggccaggcgcccgccgggaaacaccagcaccaggtccggcgcggcatcgctgaggacggcctcgccatactcgcgcagggcgttgtcgctgccactgcgctccggataatcgtaggcgcgcgaatccgcgccacgctcgcggcaccagcgctcggcctcgtccggcaggccgctgccagcatgcagcaggtggccgagcagcgccaccggttgcaggccgtggcactggtcgagcgccaggcgcaggcgttcggcgtccttgaaatggcgtccggcgcagatcaggaggcgcatgccgatccctccccttgccctggctcgtccggccgcttcgccatcggatcgatgccgctgcgttcgagcagcggataggccagggcggtgacatgatggtggatgcgtcggtagtcgcggagaatgcgctggaacacgtcaccggactccacccaggcaccgcgatcgtcgcgcaggcgacggaagcgctcgcgactggcatcggcctccagtcgctgcagcaacttcttgcgcgccaccaggcgcagcgcggcgtccaggtcttcgcgaaggaacgcgctgatcgccaggtgcaggctctcctcgatcgccgcctgcaacggcagcatgcggcccagctcgaactcgctgccggcgcgactgcgcccggcccaacgcatcgccaggggcagcaggctgttggcgacgagatcgccgatgtgctcgatgttgatggcgaacaggaggatttcctgggcacgatcggcgtcgctgtcgccgaggccgtcctggccgaggtctgccaggtaggcgcggatcgccgcactcaactggtcgagggcctggtcctggcgacggatttccgccgccaccttcgcctccggtcgctgcaacaggccgctggtggcgcgcagcatcagactggccatgtcggccagccgcaggacttcgcgagtagcgttggccaggccgatgttggccacctccagcccggcttcgtcgaggtagcgcggcatgcccgggtcgtcggactgtgcctcttccggcaacaggcgcgcgagcagcgccgcaaggggtccggtgaagccgatcgccagcagtgccagggccaggttgaaagcactgtggaaccagaccgccgccgcaccgccgagtgcgttggccggttgcgccagcgccgtcagccagggcagcaccagcaggcaaccgagcaggcgcaccagcaggttgcccaacggcaggcgccgcgccacccggctaccggccacccccaacgccggcaaggcgccgccgaggttggcaccgagcaccagggccagggcgatgggctgcgagaccagtccggcctgggccagggacgccaccagcagtaccaccgcgacactggaatggcaggcccaggtcagcagcgcggcgagcagcagggcgatcagcggatcgccttcgaggccgtggatcaccgcgacaaaggctggcgaggcctcgatctgctgcagggaatggccgagcaatgccagcgccagaagcatcaggccgagtccgatcaggcactggccaaggctctccaggcgcggaccgtcgcccaggcggaacagcagcaggccggacagcagggccagcggcgccagcaacgaggtgtcgaagctgagcagttgcaccaccagtgtggtgccgacgttggcgccgagcatcactgccagcgccggcgccaggcccagggtgccactggcggtgaaggacgctgccatcagaccggtggcggtgctgctctgcagcaggccggtgatgccgagcccggcgagcagggccagccagcggttgcccaggtggcggccgagccagttgcgcagcgcagtgccgaaaccgcgcagcacgccgctggagaccatgtgcgtgccccacaacaggagggccacggcaccggccaggttgatcaggaggatggttcccagcatggcggaactcccggttcggaatggatcgtgaagggaacgggctcattgacccatggccagcctgagcgaggcacggttgagcgcgctcgagcagtccagcaggtatttcacttcgacctggctcaggcggccgctggcgtatgcgcgcacgctgatcaccatcagcaggtgcgcggccttcgccagcagccgtgctgccaggctacagagcgcgcggcgagacgcgcccaggcatttgcgtacgacgttcatggctgcttcctcggtggaggagcgcgccgcagcgcggcacgcccttgggctcagaaacgcaaggtcgctcccgagaccagccatcgctcgcgctcgccgcgcaggtggccgccgaccagcaggtcgaggtccagccgttcgcccaggtgcagccgcggtccggcctgccagccgctgtcgccggccgactcgccgaagcgttcggcgaccagggtcaacggctggccaacgcggtattccatgcccatgccccagttccagcgatgccggcgctcgccctcggcgtaggcatgccccaggccgaccccggcgttcaggcgcagggcctcgaacggctggtagctcagcggcaggttgaagccggcgccttcgaaggcgtgccggcggtccaggtagagatccgccgagagcgcgaaggccaacgccaggccgaggtcgtcgcgggccagcagcggtgtcttcagctcggggctgaggcggctgtgccgatcgcctgcgtcgccctcgcgcaccagcgccgcgccgagctgcaccgatggtagggcggagaaggtgcaggctggcgacagcaccgactggtagcggttgccgtggtggcgttcgcgctggtgccaggcgtccaggttgcattcgccgacggggtcgatctcgccgtcgtcgacccggtaggcgccgcccgcggcgcgagcctcggacagcagcgccagcagcaggacgcaggctagcgcggcggcgacgaagcccaggcgccaggacagggcgcgtcgcagcgcggccggcagcggttggaaaaggggcgcccgcgggcgccggtcgtgcagggtcatgatgcgtctctccatgcgtgggtccggtgtgcgttgcgcggcgcggcgaggcttgccgacgcgccgggaaaggccgggacgaagcccggccgatcgctcagaaccactggccgaagcggcggatgtagagggtcttcatggtctgcgcggtgacgcagtagcagagcagcgtgcccaccagccaggggaagtactcccacggcagcggctgcaggccgaccatcgctcccagcggcgagaacggcacgtagatgcccagcgccatcaccagcccggtcatcagcatcaccggcagcgccgcggtgctctggatgaagggaatcttctgggtacgcagcatgtgcaccaccagggtctgcgagagcaggccctcgatgaaccagccggactggaacagcgactgcatttccgggctgttggcggcgaacacgaaccacatcagcgcgtaggtggtgatgtcgaagatcgacgaggtcgggccgatccagaccatgaagcggccgatgttcttcgagtcccacttgcgcggcttggcgaggaactccttgtccatcttgtcccacggcagcgacagctgggagatgtcgtacatcaggttctgcagcagcaggtggatcgccagcatcggcaggaaggggatgaaggcgctggccaccagtaccgagaacacgttgccgaagttggagctggcagtcatgttcaggtacttcatgatgttgccgaaggtctcgcggcccttgataacgccctcctccaggaccatcaggcttttttccaggaggatgatgtcggccgattccttggcgatgtcggtgccgctgtccaccgagatgccgacatcggcatctcgcagcgcgggggcgtcgttgatgccgtcgccgaggaagccaacggtgtgtccgttgccctgcagggccttgagcacccgcgacttctgcagcggcgtcagcttggcgaacaccgtgcgctcctcggccaggcgttgcagggtggcatcgtccatcaggtcgatgtcgcgaccgagcagcggctcgccgacgtccaggccgacctcgcggcagatcttcgcgctgaccaccgggttgtcgccggtgagcaccttcaccgccacgccgttctcgcgcaacgcggcgatggccgggccggcggtttccttcggtggatcgaggaaggtcagcaggccggcgatcaccaggtcgcgctcgtcgctggcgccgtactgggcctgggactccgtgcgcgagaggctgcgggtgccgagcaggagcacgcggaagccgtcgcggttgtattgctcggccagcgccagcagggcccggcggcgttcctcgtcgagcggcaggtcgacaccgtcctggtgcacgcgggtggcgatctcgagcatttcctcgaccgcgcccttgcacaccagcaggtgttcgccgtccttgccctcgaggatcaccgagagacgccgacggacgaaatcgaagggcagttcgtcgaccttgcgccaggcatccgacggcgtgatgcgcgggttctgttcgacgaaggcgaccaccgcgcggtccatcaggttcttcatcccggactggtggaagctgttcagccaggccatttgcaggacccggtcgcagcgccggccggcaacgtcgacgtgatgctcgaggatgatccggtcctgggtcagggtaccggtcttgtcggtgcagagcacgtccatggcgccgaagttctggatcgcgttgaggcgcttgaccaccaccttgcgccgcgacatcgccaccgcgcccttggccaggttggcgctgacgatcatcggcagcatttccggggtcaggccgaccgccacggcgagagcgaacatgaacgcctcggtccagtcgcccttggtgaaaccgttgatcagcagcacgatcggcaccatcaccagcatgaagcggatcagcagccaactgacgctgttcaccccacggtcgaaggcggtctgcgcccgcgaaccgacgatggaacgggccagcgaaccgaaataggtgcgcgcaccggtggcgaccaccaccgcggtggccgtgccgctgaccacgttggtgcccatgaagcagatgttcggcagttcgagcaggtcctgctggtcggcggcgatccgcttggcggacttctcgcggaccgcgccgagggtgtcgtatttctccaccggcagcgcctcgccggtgagtacggcctggctgatgaacaggtcgcgcgattcgatcaggcggatgtcggcggggatcatgtcgccggcggacaggcgcacgatgtcgccgaccaccagttcgcccatggggatttcccgcagctcgccgcgcatcccgcgctcgtcgcggcgcagcacggtggcggtgttccgcaccatggccttgagcgcctcggcggccttgcccgaacggtattcctgccagaagcgcatcaggccgctgaccaggaccatgcagaggacgatgatgacgccggtgagatcggtttcctcaccgtcctgcaggggcagccagaagtcggtgaagaagctgatcgcagagagcgtcatcagcacgtagatgaaggggttgttgaacgcctgcagcagttgcaccaggacgtgtggcggacggtcgtgggccacttcgttggggccgtcggcgtgcagccgggcggcggcctcggcctggtcgaggccgtcctggcgaccgcggacattggtgagggtggtttccaggctgttctgcgcttcgcgggcggcgcgcatggacagtcggtcgttgcggcgctcggtgtcgagctgggtattgcgttgggtcgctacgctcatgactcggtctcctgtcgcgagctgcgcgacggcgacacgagtcggttgccggtcaggtgacaggcaaaggcgtgccgggtcgcgatgttcgcgatcggtgggaagaatgttcggcttgtccgggtgaggcccactgcgcgcggccgctcaggcggcacgcagcaggccgacttggtggttcgtccatggcaggctccttgtgcgaagggttgggcaggagaaagcgtcagccgcgcatcgggcggcgaccgctctcagggttctcttcgacctgcgtctccaggcggcgatactccaggcgaccgccggccgggtcgacacgccaggcgaggctcgcaggatggccgtggccgggaaggatcgcgccgggggactgcgcggcgcgcacgcgcatcttcgccacgaaggcggatacgccgggggataccgaattctcgaagttcatgactcacctgtacccggcgtgccggacacgggtgagaagcagtgggtcagcccaggatgccgctcaaccgaccgacccgttgcgggttccgtcgtgcgttggtttgggtcatcgcaccagccggcatctgctgggccgggcgacgactactgggaatactgtccatggctctcttcgtagggggaaagaaagtgcccggctctgcgggcgggggttttatagacctcttgccagacgaggtcaaccgaaaaagccgtttcgttcaggcttctatggaacatcggaaaattcccgcaggagtccggcgaaaagacaccggccaaaagcgctcaggcggagatcagtcccgccagccgtcgcgccagcgccggcacttcggaggccgggtcgaggcgcaggcgaaaacgggtctgcaggatgtccagcagttcctcgacgtcgcgcagttggcgctgcagcgtctcgccgttgccggcgcgctggccgaacagcccgtcggccagggtcaggcgcaggtcgccctcggttatggcggccttcaggccctggcggaacacgctgtgcgggtgggtcgaggtgtaccagttgcgcgggatgtaatcgatccacaactgcgggcgcaggtcgaagcggtacagcggcagccagccgctgcgaccgcgcacggcgctttcgtagagaccggcgtgcgggtcgaccaggcgcacgcaatgcacctgtccggcgtccgcctcgtcgcccggcaaaggcagtgctcgcggcggattggccgagccgaagccgacatccaccaggaactcgccctccgccaggtacagacgcagcatcagatgcgattgctgggtcagcggcgcgtcctccgggagtccccagcgtacccgtgccaccagcagttccagctcgtagccgagggccagcagcaggcgggcgaacagcgagttgagttcgaagcaataaccgccgcggctgccctcgacgaccttggcgaaaaccttgtcggcgtcgatctcgatgggacggtcgagcagcacgtcgaggttctcgaaggcgacccggcgcagatgcgcgtcgatcagtcggtcgagactcgccagactcggcggaccgggatcgtcgatgccgatatggtgcaggtaggcatgggtctgctcgggcgtcagcggggtcatggcgggctccggaaaatggccagctcgattctagacgcattctcggggaataccggaagcgccgtcaggcacaatggcccggggtctgcttgactgtgcccatcccaccccgaggagcgccgccatggcccaggcaatcgtcgcctacctgcactacctgtcgatcttcctgctgttcgccctgctggtgttgcagcaccgcctgctgcgcctgccgctggacctggagcgcgcccgcagcctggcggcgatcgaccgcggctacggcctctgcgccctggcggtactggccagcgggctggcgcgggtgctgtggtacggcaagggcctcgactattacctgcacaatggcctgttccacgccaaggtcgggctattcgtcctcgctgccctggtctcgctgttgccgaccgttaccttccttggctggcgcggcgccctcaaggccggcgaagtgccggcggtgacgccggcccggggccggcgggtggtcctggcggtgcgcctgcaactgctcctgctgctggtcattccgttgctggctacgctgatggcgcgcggcttcggcatgcgcggctgagccctcagttctgcatggcccggccatgcacgtccatcgccgcctggcgcagcgcctcggagcgggtcggatgcggatggcaggtcagcgcgaggtcctccgccgaggcgctgaactccatggccacgcaggcttcgccgatcatctcgctgacgcccggcccgatcatgtgcacgccgagcacctggtcgctgcgggcatcggagaggatcttgatgaagccttcgctctcgtggttgatcttcgcccggctgttggcgctgaacgggaagcgtccgaccttgtactcgcgcctcgccgcctgcagctgctcctcgccgaggccgacgctggccacttccggctgggtgtagatgaccgacggaatcacctcggcgttcatctccgccgcatgcccggcgatccgctcgatgcagacgatcgcctcttcctcggccttgtgcgccagcatcggtcccgaggtcacgtcgccgatcacccagacgcccggcgccgcgctgcgctgtccctggttctccaacatgccgcgacgatcgctggccaggccgaccgtctccagccccagtccttcggtataggggcgccggccgatggccaccagcacgtagtccgcctgcagcgattccgtagcgccgccggcggccggttgcaggtcgagttcgacgccctgctcgccactgcgcgcggcgaccacgcgggtgccgaggcgaaaccgcatgccctggcgggtcagggcgcgctgcagggtccttgcggtttccccatccagccccgggcagatccgctcgaggtactccagcaccgtgacctgtgcgcccagccggcgccagaccgaaccaagctccaggccgatcacgccggcgccgatcaccaccaggtggcgaggcacttcgaccaactccagggcgccggtggagtcgaggatgcgctggttgtccacaggcacgccgggcagcggcgccggttccgaaccggtggcgatgacgatgtcgcgcgcctccagttgcgcgtggccgccgtcggcaagggccacgccgacccggccctcgccttgcaagcgcgcccagcccttgatccactgcaccttgtgcttgcggaaaaggaattcgacgccacgggtcagggcggcgacgctctcgtccttctgcttcatcatctgcgccaggtccagttccgggctgacccggatgccgagccgggcgaactcgccgccgctcgccgcggcgtatagctccgaggcgtgcaacagggccttggacggcatgcagccgacgttcaggcaagtcccgccgagggtttcgcgaccctccacgcaggccaccttcaggcccagctggccggcgcgaatggcagcgttgtagccccccggaccggcgccgatcacgatcacgtcatagctttccatcatcctgctcctcggttgtcccgccacggccccctcagcgtaggcgacgccggcgcaaatagaggaaacgccgcgtagagggaccgaaagcgattgtatttcgctcgtcatgcaaagcttatatgatgaccgtaattttcctgcaaccctttcccaccacgacaggagcactaccatggaacagcccggccgcgaagatcgcctgaacgcctggatcgccaccgagcgggccgcccgcgcccgcctcggcgccagcggaaccctggagctggcgcaagtcgccgcgctctccccgcaggagttcttcgaccgcatcggcagcggccaactgccctgtccgccctacggcgaactggtcgacttcgttcccatcgagtggtccgaagggcgcttcctgttccagggcaccccggaccgccgccactacaatccgctgggtagcgtgcacggcggctacgccgcgtcgctgctggactcctgcatgggctgcgcgatccatacccggctccaggccggccagggctataccaccaccgacctgcggatcagctacctgcgcgcgctgaccgacaaggtcggcccggtgcgcgccgaaggccgggtggtgcacctcggccgctcgacggcggtcgccgagggccggttgtacgatgtcgacgaccgtctctacgccgtcggctcgaccacctgcctggtcctgcacatggccggatgaacgcggcttcgccagggaaggccgccaggcgttaagatgacgacctgcattccaaggtatcgaagccatgcgttatcccgaagaccacaagcagaagacccgccggcgtatcgtcgaggaggctgcccggctgttccgccaggacggcgtcggcgccaccgggctgcaaccgctgatgaaggccctgggcctgacccatggcggcttctacgcgcacttcaagtccaaggacgacctggtggaaaccgcgttgcggcattccgcggcgcaactcgacgaaatcaccgcgcccctggcggaggcggaacgaccgctggcgctgctgatagagcagtacctgtcgccgcgtcaccgcgataaccccggcgccggctgcccgttgccgaccctgtcggcggaactcggccagcgcggcacgccgagcccgaccaccgacagcatcgtgcgcaagcgcctggcgatgatcgaagcggccctggagggcgaggacgcaggcgagcgcgccgtgctgctgctcgcttcgctggtcggcgcgctgcaactgtcgcgcagcgtgcaggatgaggcgctgtcgcaacggatactggaagcgacgcgcaagaagctgctggagcagatggagcgctagggcctcagccgaggtagcgctcggccggccgctgccgcgacagattgggcgcgagcctggcccgcgccgtcatcagcgcctgccaatcggccgcatccggcaacgacgggatggtcaccgcttcacgccgatcgaaaccgaccagcgccgcctccaccaggtcctcgacctccatcaccatctccgcgggaatcccggcgattccggtgccgctgcgctcccagatctcggtacgggtgacgccgggcagcaccgcctggacgtaaacgccgctgccggccagctcgtgctgcagcgactggctcaggctcagcacgtaggccttggtcgcgctatagacggcattgaacaactccggcgccagcgccaccaccgaaccaaggttgacgatggcgccgccgccacgccggcggaacccctccgccgcgccggcagccaggcgggtcagggccaccacgttgagggcgatcatccgctccgcccggtccatgtcggcatcggccagcggaccgttcatcgccacgccggcgttgttcaccagcaacgcgatcgaggcgtcgtcgcgcaaccgtcgctcgacccgcaacctatcgtcgcgctcggacaggtcggcgcgcaggatctccaccctgaccccgtgggcttggcgaagtcgatccgccagggcttccaggcgttgccggtcgcgcgccaccagcaacaggtcgtggccacggcgggccaagtgctcggcgtaggtcgcgccgattccggaagaggcgccggtgaccagggcgacgccattgccaatctgttcgttcatgtgggttctcgctggaaaaaagcctgaccgctgacagcggctgtttatattacacacttaatattatgaccataattaaaaccgtcaagcctttatccgttccaacgagcagggagggatgaggaaaaccttcatgcaaccgtcacggaaaacgccaataaaaggtcaggacccacaccaccccgacatgccctaccatggcgttgtccatcgcgggaggatcatgcgtcatgtatcacggtgaaagactcaatgcctggacccacctgatcggtgcggtcgccgcctgtaccggcgccgtatggctgacggtccaggcgagcctcaacggcagtccgtggaagatcgtcggggtcggcgtctacggcgtcaccctgacgctgctctacagcatctcgaccgcctaccacagcgtgcgcgggcgagcgaaggtggtgatgcgcaagctcgaccacctgtccatctacctgctgatcgccggcagctacacgcctttctgcctggtcacgctgcgcggtccctggggctggacgctgttcggcatcgtctggggcctggcggtactcggcatgctccaggagatcaagccacgctccgaggcgcgagtgctgtcggtggtgatctacgcggtgatgggctggatcgtgctgatcgcggtgaaaccgctgctcgccgccctcggcagcgccggcttcacctggctggcggccggcggcgtgctctataccgtagggatcgtcttctatgcctatgaccaccgcttccgccactggcatggcatctggcacctgttcgtgatcgccggcagcctcctccacttcgtggcgatctggcgctacgtactctaggcgcggtccggcgcgaagcagcggggagccggtcgcgccggaggctcagcccttcttcgtccgcgacagcgcgatgcacgccaccacgatcagcacgccgccggcgatggtcagcgcgtccggcacctcgctccagaacagccagccccagccggcgttgaagacgatgccgatatagcgggtcaccgcaacgatggtcgcgctctcgtgactgaaggcgcgggttaggaacacctggccgagcagcgacaccaccccgatggccagcagcagcccccactcgcgcagcgtcgccggcaccacgaagtcgttccacatcagcgggatggccaccagggtggccaccgccaggaagtagaagacgatctcgtaggtatggtgccgcgcgctcagttggcggatcgccaccgaggcaccggcggcgaacaccgcactgagcaggccgaccacggcgtataccgagtagctggaatagctgaacggcttgacgatcatcagcgcgccgagcaccaccaccagcaacagccaatagaccgcccggggaatccgctcgccgaggaacagcgcggagaagaggatgacgaagaacggcgacatgtgcgccaggatgctcgcgtccgccagcgggatatgggcgatggcgtagaaatagcagaccaggtacagcgcccccatcaccccgcgcaccagcagcatcggcacgccctggcgcgacagggcgacaccggcctggcgcatcagcagatagatcagcagggtaccgatggcgctgcggaagaacacgatctcggcagccggcagggtggcgctggcttccttgaccagggcgttcatcacgctgaaggtgaaggacgccagcaccgccagcagcaccccgctcttcagcaggtcgagcaccattggcgatagatggcgtccgccgccggacggctgtcgatcggatacaggcttggatggcactggctcgctccttggcaatcgatgaatcgggacacggcgttctcgtagctcgccaacaggctacgcgcctgcggcatggccaggtcgaagtgggcggccagcgcgacgatcagcgccagcttgcgatagtcctccagcggcacccgcgggagccgccagagtccgtcttcgtcgcgactgacgcggcggaacggcacggcggaaaagtcgaagtggcgaccctgctcgtcggccggagagaacggatcgaccagcaacgccgcgtagcgcacgaacagcaggtattcctggcgctcggcgccggcctcggcgaagccgtcgatggccgcgcgcggcagcatcgtctcgtgcaccgggtagttgtcgtcgttgaggaaccgcagcaggttcaacggctcggcgcccatccgccgcaacagttcgctcagctcgcaccacagccgccgcatggcgccaatggccccgggggtgataggtccctccgggtagagcttgtacatgaaaccgggcggcccctgctcggaaagtatccgggcgagggcgaactcgccgagaaagaacggactgtgcacgtaggtggtgacgttgcggccctccgccgcttccggcgtcgccaggggtaccacctccaccccgcttccggccaggactcgccgccaggtctcccgcgccgggcagtccggccggctggaacccaggtagaccctgcgcttgaccgccttggtcagggcccgcagcggttgtgtctcgtcgatcaccttggtcgccgcgtagtagctggacaggctcagcacggtcgcctggcaccccgccggcagggcgctgcgcaccagcaggttggcgccgatgaaggcggacaccagcagcagcgtgcgcaccccgccgagtcgctcccagggcaacccgcggaccacgtccaggtaactgtcggccggcacgcagagcaccagggtctgccaatcgtcgcgaagctcagcggggtcctggtggaagacgtccagcgcggcgttgccggacagccagcgatgctgcccctgcccttccaattgcaggcaggcgccgcgcgccagggtctcggcgatccgctggctgcgccggccgggatggttcagcgcgccgaggcgaccggcaccgtggcggcgcaggtccagcgcgacctggatcgccaccgcgcccagaccgaccagcaggacgttgcccaggctctcatcagcggcattcatcgaccggccttctccaggatcagggtgtcgtacagcggctggctgacccgctccgcgcaaacccgccagccatccagttcggccggctccaccggatagttgaacagtcccttgataccgctgccgtgacgcagcaggaccttggcgtcagcgcgcatgacctggcggatctgtgccagcaccgcgcttttctgctgcaccagcgaagcgatcaggaaatgcgtggcatcgcgggaaaacgccagttccgccggcggcagcgaggaaaactgcatgcgtgcctccagcccctggcagcgagcgatctcgcgggcacagcccagggcctcctcgtcgatgtccaggcagcacaaatgtgcgccgacctcccgcgccagcaccagggccgaggtcggcagggcaccggagccgacgaacaggacccgtgcatcggcatctatcccggcgctgtcgagttcgccgcggatggattccagcaggctacccaggtagcggcccatctcgccgggctcatgcagcacgccctggcaaaggtgcttctccagttcgcagagggcctgcaccgccgcgtcgcgcaggcgcaggccgagcgcctgcaacgcagggtcgtccgaatcggcctgccactgcgcccggctgcaatcctccccgatcagtccgctcagacggtcgagcttgcgcctgaggatctcgtagcagccgcaacactcgcgggcatagacggtgagcaggcgaatctcgcattccagttcgcggagggtttccagcagcggtgtgcgtccttgcatggcatggcttcctggcggcggtagagggctcagtagttcagggtcaggctcatggtcaggttgcgcggctcgccgggggcgacccagacgttgttataggaacgctcgtagtagcgacgatcgaagaggttgttgacgttcaccccgagggtggcattgctcgccagcggatagcgcgcgagcaggtcgacggtggtgtaggccggcagttcgaagccgctgtcgctgctgtcgccggcgcgctcgccgacatagttgaccgccgcgccggcatcggcgccgtgcagccagccttcgcggaactcgtagacgcccatcaggctgccgctgtgcttcggcacgttgagcaggcggctgccgcgagcgatgttctcatccttggtcacttcggcgtcgatataggcgtaggcgccgatcagccgcaactgctcggtgagctggccgctgaactgcaggtcgaagccctggctgcgcgcctcgccggcggtctgctggtaaccgggattgctcgggtcggcggtgagcacgttcttctttttcaggtggaacgcggcgagggtcatgcccagccggccatcgagcaggtcgagcttcacccccgcctcgtagccgcgcccctcctccgggtcgaaggccttgccggccatgtcggtaccgccattgggcttgaaggatttcgaggcgttggcgaacaggccgacctccggggtcgcctggtacagcacgccgatgcgcggggtggcggcacgctgggtctgctgcgagctggtgtcgcggaagcggccattgttcaggcgcgtggcgttcatgtcctggcggtagcggtcgaagcgcacgccgagcaggccgcgccatttctcgctgaactcgatctggtcctgcaggttgagggccatcgcgtcgacttcctcgtggttgcggtcgtcgcgtccgaagggtggtttcggctggccgtagaccggccggcggatgtcgatggcataggggttgcgcgacgggatgctacgcaggatcagttcgtcgttgtggtagcgctcgtactcgaggcccatcagcaactggtggcggatcgagccggtatggaggtcgccgagcaggtcgagctgggtgatgctgtcgtgccactcgaagtcgcggtagcggtactcccggcgcaggctgtagccgtcggcggcgaggctggagttctccgaggcgtagccgtccaggtggccatgcttgtagtggctggccaggcgcaggctccactgctcgttgaagtgatggcgcagggtggcctggagggtttcgttgttgttgtcgatcttgccgtcgtccggttcgccgaagaaccgcgagcgcggcaggctgcccaggtggttgtgcggcgccacggtgccgcggtcgaagacctggcggttgcgcaccacctcggcttccaccagcaacgaggtgtccgggtccagttgccagctgaacgatggcgccaccagcaggcgctggccgtcggcgtagtcgcggaagcccttgctgtcctccaccgccaggttcatccggtagagcaggtcgccctcttcgtccagcggcgtgttcaggtccagggtcgagcggtagcggtcccaactgccggcgctggcatgcaggcgggcgaagcgctcggcctggggcttcttggtcaccaggttcaccgtgccgccgggatcgccgcgcccgtacaggctggaggccggtcccttgaggatttccacgcgctcgatggtggcgctgtccggggcgttcatatagccgcggttggcgctgaagccgtcgcggtagaactccgaagtggtgaagccacggacgttgtactcgaacatcgtcaggccgccgaagttgttctgccgcgagaccccgccggcgaagtccagcgcccgttcgatacgagcgctgtcaaggtcgtcgagcacctggcgcggcaccacgctgatggcttgcgggatgtcctcgatacgggtgtcggtgcgcgtcgcgctggccgtccgattggcccggtagccctgcaccgggcccgccgcgcgctccgcttcggcggtgacagtgaggacctcaagctccgcgggactttccgtttccgcccagagcgccggactgctgcaaccgaggccgacaccgaggacaagcgacacactgactctcatgggaaatcgcaccagaaaagaaatgatatactataacgctaccagttcgattccggcctcgcaatacaatgcccggctctatctcgcgtctcgccgccaggctgtgatactcatccctcttttccgacgaccagcccagccatgcccaactccatctccaattcctcccgcctgcacagcatcgacgccctgcgcggcctggtgatgctgttcatgctgctcgaccatgtccgcgagacctttttcctgcaccgccaggtcggcgacccgatggacgtcgccagcaccgagccggcgctgttcctcagccgcaccctggcgcacctgtgcgcgccggtgttcgtcttcctcaccggcctgtcggcattcctctacggcgagaagcaccagggacgccgggcggtctcggcgttcctgttcaagcgcgggttgttcctggtggcgctggaactgaccctggtgaacttcgcctggaccttccagttgccgccgacggtgatctacctccaggtgatctgggcgatcggcctgagcatgctcgccctggccgccctgctctggttgccgcgccctctgctcgcggcgctcggcgtgctgctggtggccggccacaacctgctcgatccgctgcatttcgctcccggctcggcctggcacctgccgtgggcggtgctccacgaccgcggctggatcgaagcgggcgacgccctgcgcctgcgcacctcctaccccctgctgccgtggatcggtgtgatcgccctgggctatgccgcaggcaactggttcagcggcgccacgccggcaaccacgcgccgacgctacctcctggcgggcggtggcgggctgctgctcggcttcatcctgctgcgcctgctcaacggctatggcgagaaaccctgggccttcggcgagacgccggcgatcaccctgatgggcttcttcaacgtcaccaagtatccgccgtcgctgctgttcctcgccctcaccctgggaatcggcctgctgctcctggcctggttcgaacgcctggactggagcggtcgcggcaaggccctggtggcgttcggcggagcgccgatgttcttctacctgctgcatctctacctactgaagctgctgtacctgctggcgctggcgatctggggcgccaaccggggcgactacttcggtttctcctcggtgccggcgctatggctgtgcagcatcctgctggccgtgacgctgtacccggcggtgcactggttcgccggtttcaaggcgcggcggcgggatatcgcctggttgaaatacttctgaggcgcggagcatccaggagccgctggaaacgtccggcccttcccccccacgggtaggacgaatgctgcgaagcgttatccgccggacacagcaggcaaccacgccgacgtccaccgccggcagggaagtagaaatgaagggttgcgcggaactcccagacaacggaaacgaaacggccggcgggcgcctcgcgcccgccggccattgcctggttcgcttcccgtcgccgacgggctagccagtcaggacaggtacgccgagcgggtcagccccaggcgcagcgcatccaggtactggttgcgctcgcgggcggtgagcttggccccggcgaccttgtcgcggtagagggtcatcagttcctccggcgacaggtgcacgtagcgcagcatgtcctcgatggtgtcgtgggtctcgatgccggcgtgatagatgccgccgtctgcgcgctggtagacgttcaccgagtcggtgtcgccgaacaggttgtgcatgtcgccgaggatctcctggtaggcgccgaccaggaataccccgatcaggtagtcctcgccctccttcacctcgtgcactggcaggctggtctcgatgctctgctcgtcgacgtactgggtgatcttgccgtcggagtcgcaggtcaggtcctgcagtaccgcgcgccgatccggctcctcgcccaggcggtgcagcggcaggatcggcagcacctggccgatggcccaggtatccggcaggctctggaacaccgagaagttgcagatgtacttgtcggcgagcttgtcgttgagttcgtcgaggacctgccggtgggagcgctggcgggccttgagctggttgtgcaggcgccggcagatagcgaagtagcactgctcggcgagggctttctgcgccaggctgatcttgccgtcggcatactgcgcggcggcgtcgccgatgtagtgggtggcgcgccagtaggtctcggtgaccatctcggcatcggtcgggccgagcagttcggccagccagcggacgatctccggctgctcgtcgagatcgacgatcttcggcacgtcgtcgttgtgccgctcgacgtcggtgacctgggtgatcagcaccgcatggtgcgcggtcagcgcccggccgctctccgagaagatgtgcgggtgcggcaggccctgggcgtcgcagaactccttgagcatgccgaccaccacgccggcatagtcatcgatgtcgtagttgatcgagctggcgttgcgcgaatgggtgccgtcgtagtcgacgccgaggccgccgccaacgtcgatgtgatccaccggcaggccgagcgcgcgcagctcaccgtagtagcggatggcttccttgaagccgtgctggtagtcggccaggttggcgatctgcgagcccatgtggaaatgcagcaggcgcacgccctggtcgagaccggcctggcggaagcgctcgaccaccgacagcagctgggcggcggaaaggccgaacttggccttctcgccaccggtgtctgcccacttcgacgaagccagcgaggacagccgcacgcgcaggccgacctggggctgcacgccgacgttggcggcctcctcgatcaccagctgcacctcggattccttctcgatcacgatgaacacgttgtgcccgagcttctgccccatcagcgccagcttgatgaactcgcggtccttgtagccgttgcagacgatggtgccgcccttcggggccagcgccagcaccgccatgagttccggcttggagcctgcctccaggccgatggagacgttctcggtggcgatgatgttctccaccaccgcttcctgctggttgaccttgatcggatacagcgcggtatagcggctctggtattcgaggcgctcgatgttcgcgtcgaaggcgccggtgagcttgcgcacgcggtcctgcaggatatccgggaagcgcaccagcagcggcaggctcaggcccgcctcgcgcaactggccgaccagctcgtagagatcgatgggcgtcgagtcggcgccctgcggacgcacttcgacattgccgccatcgttgatggcgaaataacccgcaccccagtggcggatgccgtatacgccgcggctgtcggccacggtccagttgctgccatcgtctttgcgagtccgtcgagcggccatgcgcggtgatctcctcaatgttcggggtcgggcgggcgccgggatctccggatggccctgggccggcacgcctgtggtggaggctagccggaggatgtgacgttgccgtgttgaccgccacactgggcggtagtttaggaaagccgaggaaatccgctcatgcgggtatccgcagtctcccatctagggaaagggctggtgcggccttcgcggtgccggacctgcccgctctctgcaggggagaacgcggtcagccgccggacttcttcgccttgaaaccgcgcttgaggagttcgtcgatcagcagttcgacatgctcgccctggatctccaccacgccgtccttgagactgccgccggtgccgcagcgccgcttcagcgcgctggccagctccttgagcgcatcgccggcgagcggcaggccactgatggtggtcaccgtcttgccgccgcggcccttggtctcgcggcgcacgcgcgcgatcccgtcgccgacaggcgctacggcctgcccgcagatgcaggcgtctttgggttgctggcagtccgggcaatgccggccgccatcggtggaatacaccagcccgccgagggcggacagggacgaagcttttttgaccaccgggcgtttcccccagaatggcctcgacgggccaggtcaacaacgatggccggcgggagccgaccgcgacgccccactcaggcaggggctgcgcaggggcggcatggggaccgcccgaaaaggtcgcgcaatttagcagcattgcgagcaaatgctaagagcgaaaatgcgccattgatcggtgaaatggcgacatccgcggctcaggcgtccaggtacaggcgcaacgcctgcagggaatcggggcagtacggcaagctgcgagcctcctccagcgccagttcgggacggatgaagcgggcctcggagatttcctccgcctgcaggcgcaagggcgcatcggagacggcggaaaacaccgcgcaccagagccggttgcccggttcgtcgaagaagaagcgaccatgttcgcgcaggaccgcgtcgcggattcccagctcttcctccagttcgcgggcggcggagtcggcgtagggctcgccggcctggaccatgccgccggcggcgaggtcccagtacccgggatagaccgccttgctcagggtccggcgctgcacgcacagctcgccggcggagttgaacagcaggatgaaggtgccgcgaccgatcagcccgcgctcgcgcagctccgcgcgcggcaggctaccgagcgggcggtcctgctcgtcgacccaggcgatgagttcggcgtcggaggcggcccggtgggccacctcttcggcgctgatcggcgcggccatgggtcagccctgggaaagcagctggcgcaggtcgatcaccgcggcgttggcgcgggaaatgtagttggccatcaccagcgagtggttggccaggatgccgtagccgctgccgttcagcaccatcgggctccacagcggctcctgcgcggcctccagctcgcggatgatctgccgcacgctgaccgtggcgttcttcttcgccagcacgtcggcgaagtcgacctcgatggcgcgcagcaggtgcgacagcgcccaggcctggccacgggcctcgtagaagacgttgtcgatctgcagccagggggtttcctggaccacttcctcgaccttgggcgcctcgcccggctgtacctcttcggggttcttgatgttggtgttcagcttgacccggccgacactcgccgacaggcgctgggacagcgagcccaggcgggtggcgacgtcgcccagccagttgttcaggttgtcggcgcgggcatagaactgcgcgttgggctggttcgggtcggacaggcgggccaggtagcggtccagcgacttgatgccttcctggtactccgactcggacgccggcagcgcccagctcttgttgtcgaagttgaagcgcggctcggcgcgagccaggtcggcgtcctcggtggactgcgactgcgaacgggcgaaatccttgcgcagcgcccggctgatgtcgcgcacctggaccagcacgccatactcccagctgggcatgttgtccatccagatgcccggcgggaagatgtcgttggagatgtagccgcccggcttggtcagcagggtgtcgaccacttccttgagggtctccaccgtggtgtagccggtgaccatctgccgcccggcgcgctcggcggcggcctgggcgtcctgctgcacggggaacaggtcgggttcctggctccagtaccagccgaccagcatcgccaccagcaggtagatgcccagcaggcctcccaccacgcgcaccagccaggggccgccgaagtaggtacgcacatcatccacggaattgtccacgcgatcgcgcatggtcccacgacgcttcttccagtccagcatggcaagggtccttaaaacagctcgatagatgggggattggaccatggcgaacgcgttccgtgccaagcgccaacccttccaggacgccgaaaacctcggcatcgtcggctttcagcgtagtggaagccggttttgtgccggaatgctcagtgagaattttccgaaacaggcataagcatgccgtagtccgtcgcacaaaggcacccaccaacaggtggggatgacatttggaaaagaaaaggctcctctcgtcagccgcccaacggccgctggctttcatggcgataggtgatagcatagagccatcattcgcagcgacgctctgccgcgaagaccacgaaagaagcgcgtcatgatgaccgagcacgatgacccgaccctggaccgcctgaagcaccacttcgcccagcgagtgatcaaccaggcgcgccaggttctggaggtctggcaacgcctgacccgcgcggagtggaacagcgacggcatggaagaactggccgacgccaccctgcgcctgcagcgctacgccgaacgcttcgagcaagccgagcatgcccagttggccggcgccatcgaccgtaccctggacgtcgtcgaggccaaccgcggcaggctttccagcgagtcgatcagcgaactcaaccagttgatgcagcgcctgtcgcgcaccggcctgcggcatggcgaccagctcgagcacaccgtcctgccgccgttgcgcaaaccggtctacctggcactgaaggaccgcgaacgcgccgagcgcctggcccagcaactggaattcttcggtctgcaggcgctgagctgcgagaccgccgacgccttccgcgccagcatgcgcgaacgctacccggcggcgatcgtcatggaagtcgatttcgccggccccgacatgggcctgcgactggccagcgaggcccaggccggcctcgaacacaagctgccggtgctgttcttcagcgacagcgagaccgacacaccgacccgcctggccgcggcccgcgccggcggccaggaattcttcaccggcaccctggacgcctccagcgtgctggaaaagatcgagaccctcagccgcctgagcttctacgagccctaccgggtactgatcgtcgacgactcccgggcccaggcgctgcacaccgagatggtcctcaacagcgccgggatcatcacccgcgcactcaccgagccactgtcggtgatggccgagctgagcgacttccagcccgacctgatcatcctcgacatgtacatgcccgaatgcctgggcaccgaattggccaaggtgatccgccagcacgagcgccacgtcagcgtgccgatcatctacctgtccgccgaggacgacctggacaagcagctggacgccatgagcgaaggcggcgacgacttcctcaccaagccgatccgcccgcgccacctgatcgccaccgtgcgcacccgcgccagccgcgcgcgcagcctgaaggcgcggatggtgcgcgacagcctgaccggcctgtacaaccacacccataccctgcaactgctcgaggacgcccgtctgcgcgcacgtcgcgatggccgtccgctgagcttcgcgatgctcgacatcgaccacttcaagcaggtcaacgaccgtttcggccaccccatgggcgaccgggtgatcaagggcctggcgctgttcctcaagcaacgcctgcgcaagaccgaccacatcggccgctatggcggcgaagagttcgccgtggtccttccggacaccgacctggacgccgcgcgcctggtgctcgacgagattcgccagcgcttcgccgagatccactacccggcgcaaccgaccgacctgcgctgcaccttcagttgcggcatcgccgaactgaccccggacctcgatatcaagagcatggccaagcaggccgacgaagcgctgtaccgggccaagcacggcgggcgcaaccggatcgaggtatatcgtcccgacgctcgataatggccttttgtcatcagtcggtaaccgaacggaaataacctgcggtctcgccgttccgtagtcggacgagactcgccatgcgcctcaagcaactcaccaacctcaacaccctgctcctgctcaccgtctgcctcgccctgggaatcaccctgtggtggtcgcaacgcgccatggagcggcccttccagttgctcgaccagtacctggagctgtcgcagcgcttcgacgaacaggtcgcgcgcaacatccgccagtacctcggcagcggcgacgccgtgcgccagcaggccgcgctgcaagccctggaaagcctcgccgaggccttgccggagctaccgccggacctcgcccggaccctcgcgccaagcctcgcggagttgcgcgaattcagcgccggcgacctgctcgccgccggcaagctcgccggcgacccgcagggcctgctgctacaggccgagcgcgacctcaccggcaacctggaacaatggtccgcctacctggacgccgcggcggggcagccccaggccggcgcctaccgcaccccgctgctgctcgccagcctgcacctgacccgcctcagcctggcccgcgccaagctggtggaaagcgccaacccggccctggccggcgacgtcgagcgcgaattggccaacctgcgcgagcaggccgggcggatcgaggccttgccgctgctcggcgtgctcgacgagcaacgctcggccagcgacgacttcgccgccatgatggggctggccggcgacgccgaggctggcgccggcaatgccgaagaccgcggcgtggcgctgcggcgcgaactcgccagcctgctgcaacgctatccggacgagttacgccgcacccgcgacctgatcgagcgtcgccagcaactgtccgccgacaccggcgccagactggacgcggtgcgccaggccctggccaccctggaaccgcaggtgcgcggcgaacgccagcgcctgcaaggccaggtacgcctgatccagggtgggatgatcgccctgatcctgctcatcgccctcgccatcgacagcctgcaaagacgcctggcgcgggtcctcgggcaactggtgccggcgctctcggcctgggccgacggcgacttctcgcgccccatatccctgcgtacccgcaccgaggacctgcgcaacctggaagattcgctgaaccgcctgcgcagcttcctcgccgagctggtcggcgcgatccaccgccgcgccgaacaggtcgccggcagcagccagaccctggccgaggtcagcagcggcctgcacgccggggtcgagcgccaggccggcgataccgggcagatccgcgacgccctcggcgacatggaagcggcgatccagcaggtcgccggagacgccagccagaccgccgacgccagtcgcagcgcaggccaggcagtggagcatggccagcgggtgatcggcgagagcctgggcggcctgcgcgagctggtcgacgaggtgcaaggcaacgcccagtcgatcgagcgcctggccgaggagtcggcgaccatcggcagcgtgctgacggtgatccgctcgatcgccgaacagaccaacctgctcgccctcaatgccgccatcgaggccgcccgcgccggcgaccagggccgcggcttcgccgtggtcgccgaggaagtccgctcgctggcccagcgcaccgccggggccaccgaggagatccagcagctcatcggccgcctgcaacaggccgcgcggcaatcggtggaggccatgcgcagccaggtcgagcatgccgaacgcaccgccgaacaggccggcgcggcggaaggcgcgctggacgaagtggtcgccgcgatccataccatcggcgtgatggccgaacgcatcgccgaaggctcgacccagcagagccaggcggtcggcgagattcgctcgcacagcgaacgcatccacgccctgggcggggaaaacctgcggctgatcggccatagccgcgaacagggcgagcaactgcggcaactgggcggcgacctgcgcaccacggtgcaggccttccgcctgtgaccctgcggcgacgtgccgcaaggcgccaggggaaccgtctggcttcggaccggtcggataccgctcagcggaaccggggcaggacctgatcagccgcacggggctcgatcgggcccggctttccgctatcattccggcttttgatccgacgagatatccatgcgccgcctgctgaccctgatcctcctgctggtcgccctgcccgccggcgcgggcctgttcgacagccgtcccggcgcctccctcggcggcggcctcgatggcggcgacttcctcaaggtcgaccaggcgttcaagcccagcgtcgagcgcagcgacgcgcagcacgtgctgctgcgcttcgtcaacgccgagggctactacctctaccgccaccgcttccagttcaaggtcgagccagcccaggtcagcctcggccaggtgcagctgccggcgggcaagcagcaccacgacgagtacttcggcgataccgaggtctactacaacatcgtcgacctggagattcccctgaacaacccggcacggcagccctataccctcgtggtgacgtaccagggctgcgccgacaagggcctctgctaccccccggaaaccaggcgcttcgacatcgacggcggtgccgcgccgccagccgcgagcgacgcggccggcaagggcccgctcgagcacaagggcaagcgcagcctgctgttcttcttcctcgccggcctgaccctgaccttcaccccctgcgtgctgccgatgctgccgatcctctccggagtggtcctgcgcggccggccgggcggtggtcgcggcttcgtcctgtcgctcgcctacgtgctgccgatggcgctctgcttcgccctgctcggcgcgctgatgggcatgttcggcgccagcctcaatctccaggcgcaattgcagtcgccctgggtactggtgccattcgcggcgttcttcgcgctgttcgccgtggccatgttcggcttcttcgagctgcgcctgcccggcttcatccgcgaaccgctcgaccgcctggccggcgatgcgcgcggcggctcgatcctcggcgcggccaccctcggcgtgctttccagcctgctggtctcgccctgcgtctccgccccgctggccgcctcgctgctctatatcagcgccagcggcgatgcctggggaggcggcctgcaactgttcgccctcggcctgggcatgggtacgccgctggtggtgttcggcgccggcggcggcgccctgctgcccaagagcggagcctggatgaatggcgtgcgcaacgccttcggcgtgctgttgctggcggtcgccgtgtggctgctggagcgggtggtgtccggcccggtggcgctgatgctctggggcatgctcgccggcggcgccggcctggccctgggcgccctcgaattcaccccgaagagcgccgcacgccgcctgctgcaactgcttggcctgatgttcctgacctacgcggtggccgcctggatcggcgccctgcagggcgagtcggacccgatccatccgctgggccgctcggtgccgtcgatccatgccgggccgccgagcacgcccggcgaatggcagaacctgaccaccccggcgcagttggacgccgccctggccgaggcacgtcaggccggcaagccggtgctgctggactggtatgcggactggtgcatcagttgcaaggtcatcgagcgccaggttctcaccgatcccacggtgcaggcacgactgccggcctaccgcctgctgcgcttcgacatcaccgaaagcaacccggcccagcgcggcctgctggaccgctacaacctgttcggtccgccggcgatcctgttcttcgccccgggcggtgacgaatggagcgacttgcgcgtcatcggagagatcgacgccgccgggctcgccgaacgactgcgccgggccgctacccggcagtgacatgcgctgacatacttctgccgcaattgccggtcaacatgcggcgatctactgcaatctaacagtgactggacagtcatacggaaattccggcatagtgcccgcttgccgtttgcagcctgtacaggacaatcaacaagacaatggcgaccctcctcgtattgcacgggccgaatctgaacctgctgggcacccgcgagcccggcacctacggttcgaccaccctcgggcagatcaaccaggacctcgagcgccgcgcccgcgaagccggccaccacctgctgcatctgcaaagcaacgccgaatacgaactgatcgaccggatccatgccgcgcgcgacgaaggcgtggacttcatcatcatcaatccggcggcattcacccataccagcgtcgcgttacgtgacgcgctgcttgcggtgagcatcccattcatcgaagtgcacctgtcgaacgtgcacaaacgtgaacctttccggcatcactcctacttctccgacgtggcggtaggggtgatctgcggtctcggcgccacaggctaccgcctggccctggaatccgcccttgaacaacttcaactcccctgacctcactgggagtgctagcgctaatggacattcgtaaagtcaagaaactgatcgagctgctggaagagtccggtatcgacgagctggaaatccgcgaaggcgaagagtcggtacgcatcagccgccacagcaagaccgccgcccagccggtgtacgcacaggctccggccttcgccgctccggtcgccgctccggcgccggcagccgccgctccggccgccgctgccgcggaaagcgccccggccgctccgaagctgaacggcaacgtggttcgctcgccgatggtcggcaccttctaccgcgccgcctcgccgacctcggccaacttcgtcgaagtcggccagagcgtgaagaaaggcgacatcctgtgcatcgtcgaagccatgaagatgatgaaccacatcgaagccgaagttagcggcaccatcgagtcgatcctggtggagaacggccagccggttgagttcgaccagccgctgttcaccatcgtctaagccgcggggaacctgcgatgttggaaaaagtgctgatcgccaaccgcggcgaaatcgccttgtgcatccttcgcgcatgcaaggagctggggatcaagacggtggcggtacactccaccgccgaccgcgagttgatgcacctgtcgctcgccgacgaatcggtgtgcatcggtccggccccggccacccagtcgtacctgcagatcccggcgatcatcgccgcggccgaggtcaccggcgccaccgcgatccaccccggctacggcttcctcgccgagaacgccgacttcgccgagcagatcgaacgctccggcttcaccttcgtcggcccgaccgccgaggtgatccgcctgatgggcgacaaggtctcggccaaggacgccatgaagcgcgccggcgtccccaccgtgccgggctccgacggcccgctgccggaagatgaagaaaccgccctggcgatcgcccgcgaggtcggctacccggtgatcatcaaggccgccggcggcggcggtggtcgcggcatgcgcgtggtctacgacgaatccgagctgatcaagtcggccaagctgacccgcaccgaggccggcgcggcgttcggcaacccgatggtctacctggagaagttcctgaccaacccgcgccacgtggaagtccaggtgctttccgacggccagggcaacgccatccacctcggcgaccgcgactgctccctgcagcgccgccaccagaaggtgatcgaagaggcgccggcccccggcatcgacgagaaggctcgccaggaagtcttcgcccgctgcgtccaggcctgcatcgagattggctaccgcggcgccggcaccttcgagttcctctacgagaacggccgcttctacttcatcgagatgaacactcgcgtgcaggtggagcacccggtatctgagatggtcaccggtgtcgacatcgtcaaggagatgctgcgcatcgcctccggcgagaagctctcgatccgccaggaggacgtggtcatccgcggccatgcgctggaatgccggatcaacgccgaagacccgaagaccttcatgcccagcccgggcaaggtcaagcacttccacgcccccggcggcaacggcgtgcgcgtcgactcgcacctctacagcggctacagcgtgccgccgaactacgactcgctggtcggcaaggtcatcacctacggtgccgaccgcgacgaggcgctggcgcggatgcgcaatgccctggacgagttgatcgtcgacggtatcaagaccaataccgaactgcacaaggacctggtgcgcgacgccgccttctgcaagggcggggtgaacatccattacctggagaagaaactgggtatggacaagcactgatccgtcagtcgctgcgcacaagggctgcctccgggcggcccttgtcgtttccgcctgccggccgccccaacggtgctatcctcgtcgcccctccaccaccggactcctgcatggaacgcatccgccgctggtaccgccaatcgctggccgccgcgaccgaggccgcgacctgcttcgccttgggtttcagggaaagcctgcaacccgccgcactcttccgctccgcgagcctgtgcattctcgtcagcgtgctgtgcacctggctgttcgtgcatttcttcgaaccgatcatccgcctctgcggctgggccgcgctgtacacggcattcagcgtggccaacttcgccctgatccccagcggctcgctgatcgaggccggcagcggtggcccgtacttcgatccgctggcggccttcaacggcctggcgggactggcgcaactggcgttctatttcgtcggctatgccgcgctgttcttcgtcgccctgtacgccgccagcatcgtcttcggcatccgcctgggcctgcgcatcggcctgctcggacaactgaaggaacaggtccgccaacgctacccgcgactggcacctgcctccggcgaaaggatctcgctgtggcgtgccgccggcttccgcctggcaccctggctgggcgtttccggatcgatcctggtcggcctgctggttccgctctacaacggtgtactcctgctgctggcgctggcctacctgaacatccgcttcctgctgcccgccacgctggccgggctggccgatgccggcgagcagctcgccgtgcttcgtgctcgccgcggcagcctgttgctgttcggcctgctgatactgctcctggcgctggtgccgctgctcaacctgctgctgccggcggtgctcggcggcggtacctgccacctggccaatcgcggcctggcgcaactgcgcggcgaggccacggcagagagtggcagcgccggctagcctcaagtaagcttgcgcggtggaaaacgggtcgcccctgggcggcccgtttcgtttacagccgcaacagaggtcgccccatgccctggttacaagttcgcctggccatcaccccggaacaggccgaaacctacgaagacgccctgctcgaagtcggcgccgtctccgtgaccttcatggacgccgaagaccagccgatcttcgagccggacctcggcaccaccccgctgtggtcgcgcacccacctgctggcgctgttcgaagcggacaccgatgagaccgccctgctcgcccacctcgccttgcttaccggcggcgacctgcccgagcaccatgtcgaggaaatcgccgaccaggattgggaacgcagctggatggacaacttccagccgatgcgtttcggccgccgcctgtggatcgtgccgagctggcacgccgcccccgagccggacgcggtcaacctgctgctcgatccgggcctggccttcggcaccggcacccacccgaccaccgcgctgtgcctggaatggctcgacggccaggaactggccggccggcaggtgctcgacttcggctgcggctcgggaatcctcgccatcgccgcgctgctgctcggcgccgaacgggcggtcggcaccgacatcgatccacaggccctggaagcctcgcgcgacaatgcctcgcgcaacggtatcgagcccgcgcggttccctgtctacctgccggcggacctgccgcagcgacaggccgacgtgctggtcgccaatatcctcgccggcccgctggtttccctcgccccgcaactgaccggcctggtacgtcccggcggcctgctggcgttgtccggcatcctcgccgagcaggccgcggaggtccgcgcggcctactccgcacacttcgatctcgacccgaccgccgagcgcgaaggctggatccgcatcagcggccgccgccgcgccgattgatggcgcgctgccagccaccactgatcccgccccactgccttcgtgcaagaagcttggggtagactagccgccggattttccctacggatcgccgcatgagcgaaagcgtcatcacccaatgtccccattgcagcaccagtttccgcgtcaacgacgcgcaactgggcgccgccaatggcgcggtccgctgcggcacctgcctgaaagtcttcaacgccctgcaacaccaggtcggtggcgcgccgcgcgcgaacgctccttcggcagccgaagcgaagccggccgccgctccgccacccgcgcccagcgtcgcggccgccacctcggccgcgcccccggcagcgcgcccgcgcgacgaaaccctgtggatccatgacgacctcgacctggacagcctcaacctcgacgaggaactggccaagctcgacgaattcgagctgaaccaggaattctccagcatcgagaaggccccgcgaccggcggaaagcctgctggcgcgccgcgacgacgaacgcgatccacatgacgaacgctgggccgaggcgctgatcgccgatgccgaaccggcccagccggcgcgcggcaatccgcgccaggaaccgagcctcggcgaaccgctggcggaagagcgggtatccttcgtgccgctgcgccgcgccgaggatccgccggaacttcgcctcagcctcgatgacgacgatgacgacgagcccagcctcggcaagcgccgccacggcctgagcgccctggatgaagacgacgaggaaagcgccgaggaacagtccgtcgcgcccctgggcagcgcccgcaaaccggacgaggcgccggtcgagagtctcgaccagttgcgcgacgagccgctgcaactggcctgggagaagccccggcgccaatggccgcggcgtctcggctggctgctgctgatcctgctggcgctgggcggtctcgccgctcagtacatcgcctaccatttcgacgaactggcgcgccaggacgcctatcgcccctggttcgcccagctctgcccggaaatcggctgcacccttccctccaaggtcgacgtggagcagatcaggagcagcaacctggtggtccgcagccatcccgaattcagcggcgcgctggtggtcgacgcgatcatctacaatcgcgccagcttctcgcagccgttcccgctgctggaactgcgcttcgccgacctcaacggccacctcatcgccaatcgccgcttcaagcccggcgagtacctcggcggcgagctggccggacgaacggaaatgccaccgcaggtaccgatccacgtgtcgctggacatcctcgacccgggtccgaaagcggtgaactacagcctgagcttccattccccggagtgaccggaaagacctcgccggtcgccgccgggccgctacgcccacccgctcgcgcggagcgccaggcgcaagtgccgctcgtcttccaactgtaagaactaaggaatcggctgttcagaatttatccaaaacagcctttatccggtcatccagagcgggtatcatgccctcccttttttcgcagcaccgcaagacagggaagccccatgtcggtggtacgcatcggcccatatacactgcccaacagactgatcctcgcgccgatggccggggtgaccgatcgtccgttccgtcagctttgccgtcgccttggcgccgggatggtggtatcggagatggtgaccagcgacgtccgcctgtggaacagccgcaagtcgcgcctgcgcctgatccacgatggcgaggacgagccgcgctcggtgcagatcgccggcggcgatccggccatgctggccgaggccgcgcagcgcaatgtggaactcggtgcgcagatcatcgacatcaacatgggctgcccggcgaagaaggtatgcaacaaggcagcggggtccgccctgctgcgggacgaggcgctggtcgccgagatcctcgatgccgtggtcagggcggtcgacgtaccggtcaccctgaagatccggaccggctgggaccgggacaaccgtaacggcgtcaccgtcgcgaagctcgccgaacaggcggggatccaggctcttgcggtgcatggccggacccgcgccgacctgtacaccggggaggcggagtacgagaccatcgcggcgatcaagcaggccgtgtcgataccggtgttcgccaatggcgacatcgattcgccggaaaaggccaggaaagtcatcgagcagaccggggtggatgccctgctgatcggtcgggccgcccagggaagaccgtggattttccgcgagatcgaccattacctgcggaccggcgagcacctgccggcggcgccgcttcccgaagtgcagagcatcctgctcgaacacctcgcggagctgcaccttttttatggggaagaaatgggtgtgcggatcgcccgcaagcatgtggggtggtatctcgcgactctgccgggcgcaagggaattccgcgcccagttcaatcgtttgcaggacacggatgcgcagtgcgccagcgtcaggcagttcttcgccgagcgccagaacaacggaacaggggtggccgcatgacaacgatgacgaccgagactttagtgagtggaacaacgcccgtgagcgacaacgccaacctgaaacagcacctcaccacgccgacgcaagaagggcagaccctgcgcgacagcgtggagaaggcattgcacaactacttcgcccacctcgaagggcagccggtcacggacgtttacaacatggtgctctgcgaagtcgaagcgccgctgctggaaaccgtcatgaaccacgtcaaggggaaccagaccaaggcctccgagctactcggcctgaaccgcgggaccctgcgcaagaaactcaagcaatacgatcttctttaagagcggcggcgggctccggccaagggcgcgcgtcccggccggcacccgcggccggaagccagccctcaggacccttgcaatgaccgaccaaaccacccgcctgcccatccgccgcgcgctgatcagcgtttccgacaagaccggcgtcgtcgacttcgcccgtgagctggtcgccctcggcgtggaaatcctttccaccggcggcacctacaagctgctccgggacaacggcatctctgccgtggaagtggccgactacaccggcttcccggaaatgatggacggtcgggtgaagaccctgcacccgaaggtgcatggcggtatcctcggtcgccgcgacctggacggcgcggtcatggagcagcacggcatcaagccgatcgacctggtggcggtcaacctgtatcccttcgaggccacggtggccaggcccgactgcgacctgcctaccgccatcgagaacatcgatatcggcgggccgaccatggtccgttcggcggcgaagaaccacaaggatgtcgccatcgtggtcaatgccggcgactacgccgccgtgatcgaatccctcaaggccggcggcctgacctacgcccagcgtttcgacctggccctcaaggcgttcgagcacacctccgcctacgacggcatgatcgccaactacctgggtaccatcgaccagacccgcgataccctaggcaccgccgaccgcggcgccttcccgcgcaccttcaacagtcagttcgtcaaggcccaggaaatgcgctacggcgagaacccgcaccagagcgcggcgttctacgtcgaggcgaagaagggcgaggccagcgtctccaccgccatccagttgcagggcaaggaactgtcgttcaacaacgtcgccgacaccgacgccgccctggaatgcgtgaagagcttcctcaagccggcctgcgtgatcgtcaagcatgccaacccctgcggcgtcgccgtggtgccggaagacgaaggcggcatccgcaaggcctacgacctggcctacgccaccgatagcgaatcggcgttcggcggcatcatcgccttcaaccgcgagctggacggcgaaaccgccaaggccatcgtcgagcgccagttcgtcgaggtgatcatcgcgccgaagatttccgccgccgcccgcgaggtggtcgccgccaaggccaacgtacgcctgctcgaatgcggcgaatggccagccgagcgcgccccgggctgggacttcaagcgggtcaacggcggcctgctggtacagagccgcgacatcggcatgatcaaggccgaggacctgaagatcgtcactcgccgcgcgcccaccgagcaggagatccacgacctgatcttcgcctggaaggtggccaagttcgtcaagtccaacgccatcgtctacgccaggaaccgccagaccgtcggcgtcggcgccggccagatgagccgggtcaactccgcacggatcgccgcgatcaaggccgagcacgccggcctggaagtgaaaggcgcggtgatggcttccgacgccttcttcccgttccgcgacggcatcgacaacgcggccaaggccggcatcaccgcggtgatccagccgggcggctcgatgcgcgacaacgaagtgatcgcggcggccgacgaggcggatatcgcgatggtgttcactggcatgcgccatttccgccattgagtatcacggcggctgagcgcgatgcggccagccgccctacccacgaatttcacgcagggcggataacacggcgcgttacccgccgttgcgccaggagaaccccatgaacgtactcatcatcggcagcggcggtcgtgaacatgccctggcctggaaagtcgcccaggacccgcgcgtggcgaaggtcttcgtcgccccgggcaacgccggcaccgccaccgaagccaagtgcgagaacgtcgccatcgacgtgctggccctggagcaactggccgacttcgccgcgaagaacgtccagttgaccatcgtcggtcccgaggcgccgctggtggcaggcgtggtcgacctgttccgcgagcgcggcctggatatcttcggcccgaccgccggcgccgcccagctggaaggctcgaaggccttcaccaaggacttcctcgcccgccaccggatccccaccgccgcctatcgcaacttcaccgaggtcgagccggccctggcctacctgcacgagcagggcgcgcccatcgtcatcaaggccgatggcctggccgcgggcaagggcgtgatcgtcgccatgaacctggacgaagccgaagccgccgtgcgcgacatgctcgccggcaatgccttcggcgacgccggctcgcgcgtggtgatcgaggagttcctcgatggcgaggaggccagcttcatcgtcatggtcgacggccagaacgtgctgccgatggccaccagccaggaccacaagcgcgtcggcgatggcgacagcgggccgaacaccggcggcatgggcgcctactcgccggccccggtggtcaccgccgaggtccaccagcgggtgctggacgaagtgatctacccgaccgtgcgcggcatggccgaggaaggcaacgtctataccggcttcctctatgccggcctgatgatcgacaagagcggcgcgcccaaggtcatcgaattcaactgccgcttcggcgatccggaaacccagccgatcatggtccgcctggagtcctccctggtcctgctggtcgaggccgccctggccaaggcgctggacaaggtcgaggcgacctgggacccgcgtccgaccgtgggcgtggtactggccgccggcggctatccgggcgactacgccaagggcgaggtcatcgaaggcctggccgaggccgccgcgctggacggcaaggtgttccacgccggcaccgcgctgaaggatggccaggtggtcacctccggcggccgcgtgctctgtgccaccgccatcggcgagagcgtgtccgccgcccagcaacaggcctatcgcctggccgagaagatccgctggaacggctgcttctaccgcaaggacatcggctaccgtgccatcgcccgcgagcgcggcgagtcctgaccgggcccgaagccgcgggcgccgcacggcgcttccgcggcctatgccgttgccacggccacttggctataatccggccattcaccttcgaagggacttcgccgtggtacggcttcggatcgccataggactactcgtcagcttcctgctgcttctgctcggtccgatgtcgccggcggtcgcggacgacgccggcgtttccagcgttcccctgcaaaccaccgccaccacccccagcgtcaaccagaactggcgcctgctgcgcgacgagagcgcgcaactgcggatcgccgacgtcctccagcgcaaggagcagttccgcccgctggccaagcgctccttcatcttccccgccagcccccaggcggtctggctgcaggtccagcttcccgcgcagaaggtgccgagctggctgtggatcttcgccccgcgggtgcagtacctggactactacctggtgcaggacggccaactggtgcgggaccagcacaccggcgagtcgcgaccgttccaggagcgcccgctgccctcgcgctcctacctgttctcgctgccggtcgacggcaagccgatgaccctgtacgtgcggatgacctccaaccatccgctgatggcctggttcgaccagatcgacgaagccggcctggtcggcctggagaagcccgcctacgccttcggcatgctgctcggcggcatgctcctgctgctgatgtacaacctgatccgcttcgcctactcgcgcagcgccagcagcctgtggctggcggcggtgcacgcggcgctggcggtctgcgccgcggcgaacctggggctggtggcgttctggctgccgggactcaagttcaaccagtcgctgaccgccgacctcggcgccctcggcgccgcggtgagcctgctgtggttcgcctgcagcttcttccgcggcactgcggaaagccgcctgaaccgcctcctgcaaggcgaggcgctgttgatcctggcggtcggcgcgatcatcgccttcacccagcaactctggttcagttggctgatctacctgctggtgatcctcagttcgctcagcgtcccgctgatcgcggcctggcactggtatcgcggctaccagccggcgcgcctgatcgttgccgggatgatcgtgttcaacgccggcttcatggtgttcctgccggtactgttcggcaccaagcaactcgatccgggctggctggtgctcggcgtgttcagcttcgccaccctcgccgggctggtcctgagcgtctcgctcaccgaacgccagcggctgatccagcagctcaacctgcaacagcgcaccagcgaggcggcgcacaccgcggaattgcagaccaaggccgagttcctggccaagatcagccacgagatccgcacgcccatgaacggcgtgctgggcatgaccgaactgctcctcggcaccccgttgtcggcgaagcagcgcgactacgtgcagaccatccacagcgccggcaacgagctgctcacgctgatcaacgagatactcgacatctccaagctggagtccgggcagatcgagctggacgaagtgcagttcgacctcaacgcgttgatcgaggactgcctggatatcttccgggtcaaggccgagcagcagcgcatcgagctgatcagcttcacccagccgcaggtgccgcgggtcatcggcggcgatccgacgcgcctgcgccaggtggtcctgagcctgctggacaacgcgttcaagcagaccgaggaaggcgagatcctgctggtggtggccctcgacgaccagggcgagacaccgcgcctgcgcatcgccgtgcaggacagcggccacccgttcgacgccaaggagcgcgaggcgctgctcaccgccgagctgcacagcggcgacttcctttccgccagcaagctcggcagccacctcggcctgatcatcgcccgccaactggtgcggctgatgggcggggagttcggcatccagtccggcagcagccagggcaccaccctgtcgctgaccctgccgctcgacccgcagcagttggagaaccccaccgccgacctcgacggcccgctgcagggcgcccggctgctggtggtggacgacaacgaaacctgccgcaaggtgctggtgcagcagtgcagcggctggggcctgaacgtcagcgcggtgtcgtccggcaaggaggcgctggcccagttgcgcaccaaggcgcacctgcgcgagtacttcgacgtggtcctgctcgaccaggacatgcccggcatgaccggcatgcaactggcggcgaagatcaaggaagaccccaacctcaaccacgacatcctgctgatcatgctcaccgggatcagcaacgcgccgagcaagatcatcgcccgcaacgccgggatcaagcgcatcctggccaagccggtggccggctacacgctgaaggcgaccctcgccgacgaactcgcccagcgcggcgtcagcggcgtcaccaactacctgcaaccggccaaggaagcgcaggcgccgagcctgccgagcgacttccggatcctcgtcgccgaggacaacagcatctccaccaaggtcatccgcggcatgttgaacaagctcaacctccagccggacaccgccagcaacggccaggaggcgctcagcgcgatgaaggcgacccagtacgacctggtgctgatggactgcgagatgccggttctggacggcttctccgccaccgagcagctccgcgcctgggaagcccacgaacagcgcccgcataccccggtggtggcgctcaccgcgcacatcctcagcgaacacaaggaacgcgcgcggctggtcggcatggacgggcacatggccaagccggtggagctgtcgcaattgcgtgagctgatcgcctactgggtcggcgaacgcgatcgccgccgccagggcgacgccctgccctcctgagggcagcgacgtgctccggcgcggcacccggcctccgccacggcggataaccgcacgcggttattcgccctacgccccggtggtcccgcccctgtagggcgcatgacgccaacggcgttatccgccgacaccgccatttccgccacggcggataaccgcacgcggctattcgccctacgccccggtggtcccgcctcccgtagggcgcataacgccaacggcgttatccgccgataccgccacttccgccacggcggataaccgcacgcggttattcgccctacgccccggtggtcccgactcccgtagggcgcatgacgccaacggcgttatccaccgataccgccatttccgccacggcggataaccgcaagcggctattcgccctacgccccggtggtcccggctcccgtagggcgcataacgccaacggcgttatccgccgacaccgccacttccgccacggcggataaccgcacgcggttattcgccctacgccccggtggtcccgcctcccgtagggcgcataacgccaacggcgttatccgccgataccgccacttccgccacggcggataaccgcacgcggttattcgccctacgccccggtggtcccggctcccgtagggcgcatgacgccaacggcgttatccgccgacatccggcctcgttgtcacatgccacgcgaaccggcatattgccaacccgccggacatcgcaccggcccgtcgcacgctatgctcatgcccacacccggaccggaagcgcctccatgcatttgctgttcagcgtctacctgaagatgctggtgctctatagccccttcttcgtgctgtcctgcttcatcagcctcagccgcggcttcggcccgcgcgaccgcaagcgcatggcctggcgggtggccctggcggcgctgatcgccagcgtcgcgctgtacctgttcggccgctacatcttcatcctcttcggtatcaccgccgacgccttccgcatcggcgccggcagcgtgctgttcatctccgcgctgggcatggcccagggccgcgcggcggtgcagagcgacaacgtgcagcaggacgtgaccatcgtcccgctgaccattcctctcaccgtcggccccggcaccatcggcgcgctgctggtgatgggcgtcggccagggctgggaggccaagctgatctccctggtggcgatcttcctcgcctgcctgaccctcggcaccacgctctatctttccgaccgcatcgaacgcctgcttggcgaccaggggctacagatcgtcagtcgcctgatgggcctgttcgtctgcgcactggcggcgcagatcatcgtcaccggcctgaagggttcgctgttcccaggctgagcgcaccagcctgaggcggacgccctggatgccgcgccctgacgcaccgcggtggtgccaggacggagcgacggcgtacccatggacgcgccgccggcggcaaggagggaggtcagcgcgacgcctccccttccggagcccacggcgccttctccgtcgatatccggcgaaaacccgttgaaaacgccgccttccccggcacaaccaggcctgctcggcatgcttccccggcgactcgcggcgccttttcgccgaccgataccggccagcgccaagaagaggcacagcctttgctctggagcctcgacgaagagatccaggccgcagtgcgcaccccgccgtccaccggacggatgcccgacgacaagcacgacgcctcctgaaaactgccgccccgaccgctggtgaatggagaacaacaccaatgaaacgtcgcagtctgctcaaggccttcacgctgtccgcgtccatcgcttccatgggcctgtcctggtccatccaggccgccgaaaccatcaaggtcggcatcctccactcgctgtccgggaccatggcgatctccgagacctcgctgaaggacatggccctgatgaccatcgacgagatcaacgccaagggcggggtcaacggcaggaagctggaggcggtggtggtcgatcccgcgtcgaactggccgctgttcgcggaaaaggcccgccagttgctgacccaggacaaggtcgcggtggtcttcggttgctggacctcggtgtcgcgcaaatcggtgttgccggtgttcgaggaactcaacggattgctgttctacccggtccagtacgagggcgaggaactctcgccgaacgtcttctataccggcgcggcgccgaaccagcaggcgatcccggcggtggagtacctgatgagcgaggacggcggcggcgccaggcgcttcttcctgctcggcaccgactatgtctacccgcgcaccaccaacaagatcctgcgcgccttcctgcacagcaagggcgtggacgacaaggacatccaggaggtctacacgccgttcggccacagcgactaccagaccatcgtcgccgacatcaagaagttcgccgcaggcggcaagaccgcggtggtctccaccgtcaatggcgactccaacgtgcccttctacaaggaactggccaaccagggcctggaagccaccgaggtaccggtggtggccttctccgtaggcgaggaagaactgcgcggcatcgacaccaagccgctggtcggcaacctcgcggcatggaactacttcgagtcggtgagcaatccggtcaacgagaagttcgtcgccgactggaaagcctacgccaaggcgaagaacctgccgaactacggcaccgcggtgaccaacgaccccatggaagccacctacgtcggcatccacatgtgggcgcaggccgtggaaaaggccggcagcaccgaggtcgacaaggttcgcgaggcgatggccgggcaaagcttcaaggcgccatccggctacacgctggtcatggacaagagcaaccaccacctgcacaagccggtgatgatcggcgagatccaggacgacggccagttcgaagtggtctggaagacccccgagccgcttcgcgcgcaaccctggagcccgttcatcccgggcaacgagaagaagccggagcatgcgctgaagagcaactgagttctgccgtgaagaaccctgcccccctgaccaggcgttcccctgaacggaacgggaacgccccggtcgcgcgcctaacggccccctcgttcttcagggagagggcgggggaccggccataccgcacgtcgcccaggaaccccagcatgccccttgccctcctcacccgcccgctccatgcctgtgtcctggtcctggccgcccttctcgcggtgacggcctacgccggaccggcgcaggacttcgccgctgccgacaacggcggtcgcgcccacctgctcgaacactgggcggcgacgcccgacgccggtcgcctggcctttctcgaagcgctgcgccacaaccgcattgcgctggacagccgccagcagccattcatcctcggcgccgaccagcgtttccaggccgccgaaggcgacgccctgccggacggcgagccgaagccgctgcgcctgaacaatcgcctgcgcggcctgctcaacaccgccctggccagccaccagttggtggccaacgaagtgccgctgcggcaggccgccgcgcagcagttgcagaaaaccgccaaggccgcgcaacggccgctgctcgaagcgcgcctgcggatcgagagcgacgctggcgtgaaggaagccctcggcctggccctggccaacctgcaactcggcgatcccgacccggcgctacgcctttccgccgtgcgcctgctcggcgagtccggcgatccgctggcgcgaacccgcctggagaacctgctcgacccggcggtggaaccggaggaaggcgtgcgcatcgccgccgccaccagcctggcccaggtcaagcgccgactgctggtcggcgacctgctcggccaggccttcagtggcctgtcgctgggctcgatcctgctgctcgcggcgctcggcctggcgatcacctacggcctgctcggggtgatcaacatggcccacggcgaaatgctcatgctcggcgcctattccacctacgtggtgcaactgctgttccagcgcctggcgccggaatggctggcgctctacccgttgctggcactaccggtggcgttctgcgtcagcgccgccatcggcatggccctggagcgcacggtgatccgccatctctacggccggccgctggaaaccctgctcgccacctggggcatcagcctggtgctgatccaactggtgcggatgctgttcggcgcgcagaacgtcgaggtagccaacccggcctggctgtccggcggcatccaggtgctgccgaacctggtgctgccgtggaaccgcatcgtcatcatcggcttcgccctgttcgtgctgctcctcacctggctgctgctgaaccgcacgcggctcggcctgaacgtccgcgcggtgacccagaaccgcaacatggcggcctgctgcggggtgcccacagggcgcgtggacatgctcgccttcggtctcggctcgggcatcgccgggctcggcggggtagccctgtcgcaggtcggcaacgtcggcccggacctcggccagggctacatcatcgactccttcctggtggtggtgctcggcggcgtcggccagctcgccggcagcgtcctcgccgccttcggcctcggcgtggcgaacaagatcctcgaaccgcagatcggcgcggtgctgggcaagatcctgatcctcgcgctgatcgtcctgttcatccagaaacgcccgcagggactgttcgccctgaaagggagggtcatcgattgaagcagccactcaccgtcaccctcgcccgccgggccggcggccgcgtcaccgctatcgcgctcggcgcagccttcgccacgctgctggccatgccgctgctgcacctgctgccggcggacagcgcgctgcacctctcggcctacagcctgaccctgaccggcaagatcctctgctacgccatcgtcgccctcgccctcgacctggtctggggctacgccggcctgctgtccctcggccacgggctgttcttcgccctcggcggctacgccatgggcatgtacctgatgcgccaggcctccggcgacagcctgccggcgttcatgacctttctttcctggaacgaactgccctggtactgggccggcacccagcacttcctctgggcgctgtgcctggtggtgctggtgcccggcgcgctggccttcgccttcggctacttcgccttccgctcgcggatccgcggtgtgtacttctcgatcatgacccaggccctgaccttcgccggcatgctgctgttcttccgcaacgagaccggtttcggcggcaacaacggcttcaccgacttccgcagcatcctcggcttcccgatcaccgcgccgggcacccgcgccgccctgttcctcgccaccgtcgcgctgctcgcggccagcctgctgctcggctggcgcctggcgcgaagcaagttcggccgggtcctcaccgcgctgcgcgacgccgagaaccgcctgatgttctgcggctacgacccgcgcggctacaagctcttcgtctggaccctgagcgcggtgctctgcggcctcgccggcgcgctgttcgtgccgcaggtggggatcatcaaccccagcgagatgtcgccgaccaactccatcgaggccgccgtctgggtcgccctcggcggacgcggcaccctgctcggcccgctgctcggcgccggcgtggtgaacggcgcgaagagctggttcaccgtggccttcccggaatactggctgttcttcctcggcgcgctgttcatcgtcgtcaccctgtacctgccgcgcggcctgctcggcctgctgcgcaaggagaaggagcaatgaggaccaccccgcacctgatgctcgaaccggccttccaccccggcctcgataccgccggcagcggccgcgacgccatcggcctgggcgccgccaccagcggccggctggacgtgcgccacggcaccatcctcagcctggaagacatcaacgtcagcttcgacggcttcaaggccctgcgcgacctgaccctgtacatcggcgtcggcgaattgcgctgcatcatcggccccaacggcgccggcaagaccaccctgatggacgtgatcaccggcaagacccgcccgcagagcggtaccgcgtatttcggcgacaccctcgacctgacccgcatgagcgaggtgcagatcgcccaggccgggatcggccgcaagttccagaagcccacggtgttcgaggccctgagcgtgttcgagaacctcgaactggcgcagagggccgacaagtcggtgtgggccagcctgcgcgcgcggctcgacggcacgcagagggaacgcatcgaggaggtgctcgccaccatccgcctgctggagtcgcggcagcgtccggcgggtttgctgtcccacggccagaagcagttcctcgaaatcggcatgctgctggtgcaggaaccgcagttgctgctgctcgacgagccggtggcgggcatgaccgatgccgagaccgaattcaccgccgagctgttcaagtccctggcgcgcaagcactcgctgatggtggtggagcacgacatgggtttcgtcggcagcatcgccgaccatgtcaccgtgctgcaccagggccacgtgctggccgaaggctcgctggcggaggtacaggccgacgaacaggtgatcgaggtctacctcggtcgctgacgccagccatccgctcggcgggtagcgcctgccaagtggcgcccgtcgcgtagggcgaatgaccgctcgcggttatccgccgagccaggttgggaatcgcagtgaagaaccatcacgggacaaatggaagagaaccatgctgcaagtcgacaagctccaccagtactacggcggtagccatatcctccgtggcctgagcttcgaggcgaaggtgggcgaggtgacctgcctgctcggtcgcaacggggtgggcaagaccaccctgctgcgctgcctgatgggcctggtcccggcccgcgagggccaggtcgcctgggaaggccgttcgctcaccggactcaggccgcaccagcgggtccgcgccgggatcgcctacgtgccgcagggacgggaaatcttcccccggctgacggtggaagagaacctgctgatgggactgtcccgtttcagcgccagggacgcccgggcggtgccggacttcatctacgagctgttcccggtcctgcgcgaaatgaaacagcgccgcggcggcgacctctccggcggccagcagcagcaactggcgatcggccgcgccctggccagccagccgcgactgctgatcctcgacgaacccacggaaggcatccagccttcggtgatcaaggagatcggcgcggtcgtccgcagcctggcggcgcgcggcgacatggcgatcctgctggtcgagcagttctacgacttcgccgccgaactggccgaccaatacctggtgatggcgcgcggcgagatcgtccagcagggccgcggccgcgacatggagagcgagggcgtgcgcgggctggtggcgatttgaacggactgggacacactgccgctggcgcaaccggggcctgcgctggcaatctctatgccctcgtctttccgcaggaggtcgaaatgaccgtcactctgcgcccggccgtccaggccgacgcgggcttcgccgcgctctgcgtcgccgccgcctatgccccgtggatcgcggtgatcggccgcaagccctggccgatgacccaggactaccacgaggtgatcgccagcgaccgggtcctcatcgccgagcacgacggccagccggtcggcctgctggtgacgcgggaaaccgccgacggcttcctcgtcgacaacctcgccgtgcttcccgaatgcaagggccagggcatcggccgacaactgctggagcgtgccgagcgcgacgcaacgagcctcggctaccgctcgctgtacctctacaccaatgagcggatgacggaaaacatcgagctctacgccagggtcggctacctcgaatacgaacgccgccaggaagagggattccgccgcgtgttcatgcgcaaggccctggcctgacccgaccgatgaccgccgccctccccgacctgagcttccaccccgcctggcacgcccaactggagctggcctacgcccgcgccggcgacgccacccgcccggtgacgcggcgccactccggaccgctgcgggtgcagaagcacctctacgccgaaggcccggaagtctgccagcacatcctcgtgcatccgcccggcggcatcgccggcggcgacagcctggccttcgacgtgcgcctcggcgaacgcgcctgggcccagctcaccagccccggcgcggccaagtggtaccgcgccgcctgcccgtcgcggcagaccctggagatccacctggagcccggcgccaccctggaatggctgccgcaggaaagcatcgtcttcgccggcgcccaggccgaactggaaacccgtatccagctgcgcggcgacgcccgcctgttctactgggacatggtcgcgctcggccgcccggccagcggcgagcgcttcgtcagcggccacttcgtcgcggccctggacatccgtcgcgacgaccgcctgctctggcacgagcgccagcgcatcgacggcggcgaccgcctgctcgactcgccgatcggcctcgccgggcatccggtgctggcgaccctggtcgccagcggcgagatcgacaccgacctgctgcaacgctgccgcgcgctcccctgcgccggccgcggcaacctcagccagttgcccggcggcatgctggtggcgcgctgcctggccgacgaggcgctgcacgcgcgagcctggctgatcgaactctggcgcctgctgcggccggcgctgctcggccgcgaggccgttcccccacgcatctggagtacctgagatggacttgtccccccgcgagaaagacaagctgctgatcttcaccgccggcctgctcgccgagcgccggctggcacgcggtctcaagctgaactacccggaggcggtggcgctgatctccgccgccctgctggagggcgcgcgcgacggccgcagcgtcgccgagctgatgcactacggcaccaccctgctgaaccgcgagcaggtgatggagggcgtgccggagatgatcccggacatccaggtggaggccaccttccccgacggcaccaagctggtgaccgtccaccagcccatcgcctgaggccggccatgagcgcttcgatccgcgacgccggcgtcgccgacctgcccggcatcctcgccatctacaacaacgccgtgggcaataccacggcgatctggaacgaaaccccggtggacctggccaaccgccaggcctggttcgacacccgcgcccgccagggctacccgatcctggtggcaagcgacgccgccggcgaagtgctcggctacgcctcctacggcgactggcgacccttcgagggcttccgcggcaccgtcgagcactccgtctacgtgcgcgacgaccagcgcggcaaaggcctcggcgtgcaactgctgcaggcgctgatcgaacgtgcgcgggcccagggcctgcacgtcatggtggccgccatcgaaagcggcaatgccgcctcgatcggcctgcaccggcgcctcggcttcgagatcagcgggcagatgccgcaggtgggccagaagttcggccgctggctcgacctgaccttcatgcaactgaacctcgacccgacgcgcagcgcgccctgagccccaaggagcccccatgatccccggtgaatacgacatccagcccggcgatatcgaactcaacgccggccgccgcaccctcgccctgagcgtggcgaacaccggtgaccggccgatccaggtcggctcgcactaccacttcttcgaggtcaacgacgccctcgccttcgaccgtccggccacccgtggcatgcgcctgaacatcgccgccggcaccgcggtgcgcttcgaaccggggcagagccgcgaggtggagctggtggaaatcggcggcggacggcgggtatacggctttgccgggcgggtgatgggggacctctagggccccactggccaggttcgaccaaagacagcgaacaccgacgatcgccaaaggagcgttcgatgaaaatcagcagacaagcctacgccgacatgttcggccccaccgtcggcgaccgcgtgcgcctggccgacaccgacctgtggatcgaggtggaacgggacttcaccgtctatggcgaggaagtgaagttcggcggcggcaaggtcatccgcgacggcatgggccagagccagctgggcgcggcgcaggtggtcgacacggtgatcaccaatgcgctgatcctcgaccactggggcgtggtcaaggccgacgtcggtctcaaggacgggcgcatccaggccatcggcaaggccggcaacccggacatccagcccggggtgaacatcgccatcggcgccagcaccgaggtgatcgccggcgagggcatgatcctcaccgccggcggcatcgacacgcacatccacttcatctgcccgcagcagatcgaagaggcgctgatgagcggggtcaccaccatgatcggcggcggcaccggccccgccgccgggaccaacgccaccacctgcacctccggtccctggcacatggcgcggatgctccaggccgccgacgccttcccgatgaacatcggcttcaccggcaagggcaacgccagcctgccgctgccgctggaggagcaggtgctcgccggcgccatcggcctgaagctgcacgaggactggggcagcaccccggcggcgatcgacaactgcctggaggtcgccgagcgccacgacatccaggtggcgatccacaccgacaccctcaacgaatccggcttcgtcgagaccaccctcggcgccttcaagggccgcaccatccacacctaccacaccgagggcgccggcggcggccacgcaccggacatcatcaaggcctgcggcttcgccaacgtgctgcccagctcgaccaacccgacacggccgttcacccgcaataccatcgacgagcacctggacatgctgatggtctgccaccacctcgacccggccatcgccgaggacgtggccttcgccgagtcgcgcatccgccgcgagaccatcgccgccgaggacatcctccacgacctcggcgcgttcagcatgatcagctccgacagccaggccatgggccgggtcggcgaagtgatcacgcgcacctggcagaccgccgacaagatgaagcgccagcgcggccgcctcgacggcgacggtgcgcgcaacgacaacttccgcgccaggcgctacatcgccaagtacaccatcaacccggcgatcacccacggcatcagccatgaagtgggctccgtcgaagccggcaagtgggccgacctggtgctctggcgcccggccttcttcggcgtcaagccgagcctgatcctcaagggcggggccatcgccgccagcctgatgggcgacatcaacggctcgatccccacgccgcagccggtgcactaccgaccgatgttcgccagctacgccggcagccgtcacgcgaccagcctgaccttcgtcagccaggccgccttcgccgccggcgtaccgcagcagctcggcctgcgcaaggccatcggcgtggtcagcggctgtcgcggtgtgcagaagaccgacctgatccacaacggctacctaccgaccatcgaggtcgacgcacagaactaccaggtacgcgccgacggccagttgctctggtgcgaaccggcggacgtgctgccgatggcgcagcgctatttcctgttctgattcccacgcgacgggtcccggcgccacgccgggacgtcgaccgctccgttcggacagcttggcttgtcggcgctagcggcgacaatggcgcctacccgtagccgccggcagtccgtccatgtcctcccgccaatcgtcccgcaacgcttccaccccgtatctggccaaggccttccaggcaacggccatcgtcgtggtgagctacttcctctactggacctaccagctctaccagtacggcgagattcccatcagcaagaaggacgtgatgctgcgccaagccatcctcgcgcgctttccggcggactacgaggtggagatcaagggcgccgacctgctcggcttcggtgagaaattcctggtcgcctacggcaatcggcgcttcgtcggcaaggccttcgccatggacgaccaggtcatcgagcgcctggagcggaaccagggacggaccaacctgccgctggtgaaggtgttctacatcgccgaacccggcctcctctcctcgctgctcaacctctccccgttcctggatatccagaagaacatggtcgagctgagcctccgggaataccggaagatccagttggtccccttcgatccggacgcgaagcggaaaccgcgcgagcagttcgaaaccgattatgccttcccccagctgttcagcctcagccaactggaagtcgccgactacgacggcgacggccgcgacgaactgcgcctgggctacctgtcctacgccggcggttcgggagggacgcgctggtcggtgatctacgacctgaaggacggcgcgctgaccgcccattccggctatccggaaatgctcgacatcgacgtcgcccggttcatccaggcggtcaacctgtacgccgggctcgacggcaccttgccgcgcgaccagcgtcagctggaagacgtggtcggccgaggcagcgagcgcttcgcgctgaccgccgcggagcgccaggcactggtcgccgacccgccgcagcgggacgactacgccagggtcctgatgagcctttcgccgcgctcgccctacgcccccgatcgcttcatcgacctcggcgacggcagccgactgagcctggccccgcgccatacagacgattactcgaccttcctcgacatcggcgggaagaaaatcttcgtcgaagccttctacgtcgacgacgacgcctgccactggtgcgagcatcgctggcgagtgatggctttccattacgacgacggtcgctggatctcggaccgcaccatcaacggcgacagcttcaacgggcaatggctgcgcaacgcggagccgctgggcctcaacgacgttttcggcacctaccgcgaccagggcccggcgggcctggcctggtccttcatcgacccgcgctggaccgcctccagccagcatgacatggacgatccgctgggcgtgggaatgcgcaccctgtcgccggtggagcaatgggtgaaggaacgctatcgggaaaactgaggcaggccttcagcgcaactggctgtccttgctgccgcggcggttgtagccgctgaacttcgcctgttccctatcgtgctcggcctggcagttgacgcacaggcgcacgccgggaatcgcccggcgccgcgcctcggggatagtcgcgtcgcactcttcgcaatgggtcaggctctcgccacgaggcaactggctgcgcgcacgagcgatggcatcctcgatcgtgctgtcgatctgttcctgcaccgcaccgtcgttcgcccacccgctggccatgactgactcctctggctgaaaccctggaacctccagatatgggcgttcgcccgcggctttgcaagggcggcgcgaccatcggcctggcgtggcacaatcgccagacaagcctgaaggtacaccgcatgatgggaccgttccgccgcctcgcccacctgatcgaccagggccgccagctcgacgccgcgctcgccggcgatccgttcgccctgccggcgccggaggaccgctatagcgtccggcaactgcacggcctgtatccgcgccgtcatcccggtctctacgcaccgctgctcggcagcctggcgctgctgctcggtgccgcgccgctgggtcttgccgcgctgcgcctggcattgccggaggctcctttgcggccgctgggctggctctccgccctgccgctgctggcggcctggctgtggctgatcgccctgctctcccgtggcgccagcctcggcccgcgcctggcccgcgacgccagcctgctgctggtcgccaccgggctcctgctgcgcctggccagcggcgagacgtcgggcctggtggccctcggcggcggcgcctgtgcctggctgctgttcaacagccgggcgatgcaacgctacatggaactggtctacgcccagcgcctgtaccgcgcccagtcggccaaccgccccggttcggcgcagcggcgcctggccaaccaggccgcctaccgcgaacgcaagcgacgcgagcgctccgggcgatcctgaaccagactgtcgccctgcgaccttctgcgcattggcgggcgccgccgacctgcaggcgcggcagcgcaacatgggcctggcctgaggtcgcctactctttgacttccatgtagtcgcgggcccaggcctggtattcctcggggaaggtgtacttcttcgacagctccgaggcggtcaggtccgaggccaccgcaccgcgctcctcgcgcaggcagtcgtaggtcgccttgatcgcggcgaaataggcggcgtggccgttgaccacgacacgcacgccgagccgcgccaggcgggcgtcgtcgcgcagttgcggattaccgtaggtgaccagcatcagcgggatgtgcaggtgctcggcgatcgcctcgaggtgggcgaagtcgcgcacgccgaccaggcagataccatcggcgccggcttcctggtaggccagggtgcgctggatcaccgcatcgacgtcgatcagttcggcgttggtccgggcaatgatggtcaacgccgggtcgaccctcgcctccagggccgcgcggatcttgccgacgccttcctcgacgcagatcaggtcggtggacttgcgcccgaactgcgccggcagcagggtgtcctcgatggtcagcgcggcgattccggcgcgctccagttcgaccaccgtacgcatcacgttcagcgcgttgccgtagccgtggtcggcgtcggcgatcaccggcaggcgcgccacccggccgatgcgggtggcctgctcgacgaattcgctgagggtgatcagggcgaagtccggcgccgccaggacctgcagggaagccaccgaaccgccgaggatgccgcactcgaagccgaggtcggcggcgatacgcgccgacatgggatcgaacacggaagcggtgtggtagcaacgggaggagtccaacagcgcgcgaaacatcgcacgcaactcatggtgtgaggctctatgcatggcgaaatccaggacaacacggcaagacggagtgggaaagcagcgccaacatagcaccatgcgcaggccccttggcaaatccgtatacaaaggtcggggcggcccgcacggacgtcccaggacgcttcctgccgatcgccggcggtgaaatccgcgacgctctcgcatacactgcgcggccgtttttttcccggaccgtttcgcgccatgaacccgagcaccgccgcccgcgccctgggcatcgattttggcacctccaactccaccgtcggctggtggcggccggaggtcgaaccgctgatcgagctggaggacggcaagatcaccctgccctcggtggtgttcttcaacgtcgaggagcgccgcccggtctacggccgccaggcgctcggcgagtacctggagggctacgagggccggctgatgcgctcgctgaagagcctgctgggctccaagctgctgaagagcgagaccaccgtgctcggcagcgccctgccgttcaaggacctgctcggcctgttcatcggccagctcaaggcgcgcggcgaggccgccgccgggcaagccttcgacgcggtggtgctgggtcgcccggtgttcttcgtcgacgacgatccggaggccgaccgcgaggcccaggacaccctggtgcaggtggccaacaagctcggcttcaaggaggtttccttccagtacgaaccgatcgccgcggccttcgactacgagcgcggcatccagcgcgaggaactggtcctgatcgtcgacatcggcggcggcacctcggacttctccctggtgcgcctggcgccggagcggcgcaacctggccgagcgccaggacgacatcctggccaccggcggcgtgcacatcggcggtaccgacttcgacaagcagctcagcctggaaggcgtgatgccgctgttcggctacggcagccggatgaagagcgacgccttcatgcccaccagctaccacctgaacctggccacctggcacaccatcaacgcggtgtacgcgcagaagtcgcaattggcgctgaagaacatgcgctacgacatcgtcgacagcaccggcatcgaccgcctcttcaggctcatcgaggaacgcgccgggcactggctggcgatgcaggtggaagacagcaagatccgcctgaccgaaaccgagcgcctgcacctctcgctggagcgcatcgaggccgggctcggcgtggagctgacccgtgggctgttcgagaacgccgtcgacggactgctggagcgcgtgcgcaacagcgtcgcgcaactgctggcctcggccggggtcgacccggaccgggtcgacacggtgttcttcaccggcggttcgagcggcattccggctctgcgccggagcgtctcggcgatgctgcccaacgcccgtcatgtcgagggcaacctgttcggcagcatcggcagcggcctggccatcgaggcgaagaagcgctatggctgagccgccctggtcgtgcccctgccctatagggggataaggtcacaccgggcccgccatggcggataaccgcgagcggttatccgccctacgccaggaccacgccacacccgtccgcagggcggataacgccacaggcgttatccgccgccacaccgagcccgacgagggtggggctcacttcttcaggcaggtgctcatgaacgccttgcgttcgtcgcccttgagcgccttggcggtggcgtcggcgttgcaggtcttcatcttctcctgctgggtcgccgccttggcactgccgccggccttcaggcaactgctcatgaatgccttgcgctcgtcgcccttgagcgacttggcgctggcgtcggcgttgcagctcttcatcttctcctgctgcgcggtggccttgccgccggcaggcgcgccggccttcaggcagccgctcatgaacgccttgcgttcgtcgcccttgagcgccttggtggtggcctcggcgttgcaggcggtcatcttctcctgctgcgcggtggcagcgaaaccatgggccgagacggccatggccaatacgaacatcgggatacgcaggatattcatcgaactctccttgaagggctgcacgttcgcatgcaggtgcgctgaagtctagcgactgtggcgggctttgcaggggctgggaacgcgtcctgtgcgcttgcgacaagcgtcatgtttcgcggctagactgacgcttcgcacgaggaggagttccatgcaacaggtcatcgcggtgagcctctgcgccacccacgcgttcagcaagcaggtgcgtcccgccatccgcctcctgaaaggcctcggcgtcgagggcgacgcccaccacggcgtcaccgtgaagcaccgctcgcgggtgcggcaggacccgacccagccgaacctgcgccaggtccacctgatccacgaggaattgcacgacgagctacgcgccagcggcttcgccatcggcccggggaccatgggcgagaacatcaccacccgtggcgtcgacctgctcggcctgcccaccggcacccgcctgcgcctgggggaaagcgccctggtcgagctgaccggcctgcgcaatccctgctcgcagctggacaactaccagcccggactgaccgccgccgtgctcggccgcgacgaacagggcaacctgattcgcaaggccggggtgatggcgatcgtcctggaagacggcgaggttcgccccggcgacgccatcgatatccagctgccccccttgccgcaccgggccctggagaaggtctgaggcaatccgccgcgattccgggcgaactctgcgcgagggcctgcgttccaatgttggcaagcaccgctcaaccacaaggagtcacagcatgtacaagcagtcactggcggcactgttcgtgatggcaaccctggccggctgcgcgtcgaccaaggtgcagaacccggtcaactacatcaccttccgcaacgaaccgctggtcaaggatgtcgagaaaggcatgagccagcaggaagtcctgcgcatcggcggcacgccttccggcacccagaagcgcctgatgaaaccggggagctgcaacagctacatcctcaacaaggacggccagcagcagccgttctacgtcagtttcgacggcagcggcaaggtcgacggctcgggcttcctgagctgctccgagctggaccgccacgagcgcgacgcccgcccctgacggctcgacgccccgcttccttacggaggcggggcgtctgcgttcaggcccgggacagggcctcgatcagttcggccttgcgcatcgtcgaacgaccgcggatgtcgcgcttgcgcgccagctgcatcaattcctcgcgggtcatctcgctcaccgaggtgctgccttgacgtttgccacggctcgccgagccgcggttggccggtctccctgagcgggcctgggcggcgcgatgggccgagtccttgcggtcggcgcgcttggccgtctcgctcttggcgcggccggaaccgcccttgcgctcgccgccgccggactgcttgttcaccgtcgcccaggcgcgcgcctcggcttccgactcgctcacacccttggccttgtagctctcctcgatgtgctcggccttgcgctgctgcttgtcgctgtacttgctcttgtcgccacggggcatggggatatctccctttgcgatgggttcactgttgggaccgggaggcgacggcggacgttcagagaaagtgcgcaccggcacaaaccccttgaccttgccccaggggcaatccgtagtctgccggtatcccgcagcaggaaccggaaatgctcaccatcggccaactggcgcgaatcttcgagatctccaccaagacgcttcgccactacgatgccatcggcctgttcgtccccgcgcgcaccggtagcgacaacggctaccgctactaccagccggaacagatcgagcagctctcgcgcatactcgcgctgcgccggctggacgttccgctggaagccatcgaccgcctgaaacgcgatggcgcgctggacgacccgcaacgcctgcggcatttcctgcaacgacaccagcacaccctgcgcgaagagatcagcgcccgccagcgcctgctggcggaactcgaccgaaccctggcgacgctcgcccactggaggatccgcaacatgcatgcacgaatcgtcgaacgtcccgccttcagcgtggtgggcatggaatacttcggcagcgcccccggcgacaccatcggccagctctgggaacgcttcatcccgcgcgagcacgagatcgccggcaagcacgatcccgaggtctcctatggcatctgcgcgcagcagcccaacggcgaattccactacgtcgccggcttcgaggtgcaggagggctggccggtgccggagggcatggtgcgcttccaggtgccggcgcagaagtacgcggtgttcacccacaagggcacggcgccgcagatcgccgagagcttccaggcgatctacagccacctgctcgccgaacgcggcctggagcccaaggcgggggtcgacttcgaatactacgaccagcgtttccgcggaccgctggatccgaactcgcaagtcgacctgtatatccccatctactgaatcagcgcttgccggccggcaccttggctggcaagcgcatgcgctgcagcagcgcggtgcactggttgtcgtcgcttttgctcggcgccaccagcgccagcaggctggccgccgggcccaccgtcacgccgagggctatcattcccgcgccgcgcgccaccagcggcccggcatggaccccggcgtcgggcttggcgaaggtgccgcgcacgtacagcggcgagcgcagcgagaagatccgcaagcccttgctgtgcggggtgacatcgagatcgagcttctcgttggcgaagttcaccgtgccgtcgacgttgaccagcgcgttctcggtgtcgaagacgaacagccggctggtcatcaggcccttctgcaggccgaagtcggcggccgcgcagttgatcttcacctcgtcgtcgccgaacagcttggtcaccaggtagtttccgacattgaggccggcgatttcggtcaggcccttgctgatcgcgccgtcgttgatcagcatcttcaattcgccatcggcgccgccgaggatcttcgccaccgaattgccactgccgctgagactggcgtcgccgttcagctcgccgaagctggtctgcatcggcgcgaagccggggaacaactgcttcagcttgaagccccgcgcgctcatcttcactcggctctgcatcggctgcttgccgccgtccaggcggatgtccgactccagcttgccgccggccacgccgaagcgcaggggctccaggcgcagcaggccgtcgttgagcaccagatgggtatagaggtcgctgatcggcaactggtcgctgtggacgatacgcttgccggtgaattccacgtcggcgtccatgtcgcgccagcgctcggtacggaattcctccaccggcagcaccttgtcgcccggctggcggctggtctgcccgcgcttctgtttttcggcattgctgtcggcgccgatcagcgggccgaggtcggcgaagcgcagttgctcggaggtcagcttgccggacagcttcggcctaggctggcgagcgacgaaggtcaggctgccgtgcaggtcgctggcgccgaccttgccgttgaagttctcgtagcggaacagtgcgccgccctcctccttgagccgcgccagcaggtgtccgtcggtggagtaggccggagtgtccggcagggtgatgccggtcagcggatagagattggccatgctggtcccggccagcttcaggcgcaggtcgagggcgccgaggttgagcgggtcggtcagggtgccgaccaccgcggcacgggtgctgccggcactgacctcggcctgtagcgggaagggcttgctcgcatcctgcaacgccagcatcccgccgaccttgcccgagccggccagagcctggcccttgtaggtgcccttgaccttccagccgaacacatagtcctgggcgtccgccgcatcgcccgtggccagcgccttgccggccaactggccgaacggcaccggcttgccgagcgggtcgaccagcacttccaggcgggtcttcaaacgctggtcgtcgaggctgacgctacccttgtcgaaaccgatctcgcggatgtccagttgccaggcggacggctcgtcgctgtcgctggcaggcaggtcgaaatcccagttggcgcggccgtcggccaggcgcaggagctcggcgcgcggctgggtcagcttgatctgtggaatgcggatggtctgccagagcaacggcaacggcgcgaggcggaattcgatgcgttccaggctggcgaactcgctcgccttggtcttgcccgccgtccactccgggttgccgagggtgatgtcctcggcgctgaagcgcggccaggggatccaggcgcgccagccttcctcgccctcctcgcggcgccaggccacggcgaggttgccgttgatggcgaacgggcggttcagcgccgccgagaccttttcgttgagggtgggcttgatcaggttccagtcgaaggtggcgatgaacaccaccaacgccgccagcagcaggaccaggctggcgaggctccaggtcaggatctttcggccgcgcgtcatgcacaactccttttcgccgcgtcggttgtcgggcaggcgcggcagcgcgcctcgctcagcccgtcagtgtgcaggctggcccatggactcgccagcgcgaatacgccggcccgttccgttaggaccggcgaaacgccggcattgctccccgtcccacgcatttcaggcaaaaggccagttcggcggcgggtcgataaaactttttcgaccgcgtgggactcacaccttaggtaagcagaaaaagccggccgcagagccggcccttttcaccggatcagcctcaaggagaaaaccgatgaccaccgttcaactgacggacgtccagacccttcgcgaccgtgcccgcaagaacatccaggaaggcgcggtcaccgaaggctattcggccgatcgccagaccgtcctgcgcctgctcaacgaagcgctcgccaccgagttggtctgcttcctgcgctacaagcgccactacttcatggccaccggccttaaggcgagcatcgccgccgccgagttcctcgagcacgccaaccaggaaatgcagcatgccgaccagttggccgagcgcatcatgcaactgggcggcgagccggacttcaatccgcgcggcctggaggagcgctcccatgccgaatacgtcgaaggcaagaccctgaaggacatggtcaccgagaacctgatcgccgagcgcatcgccatcgacagctatcgcgagatcatcacctacctcggtaacgacgaccccaccacccgacgcattttcgaggaaatcctggcccaggaagaagaacacgcggacgacatggccgacatcctcgacgacctcgcctgactccagagcaagacccgtccgagagccggcgcccgcagcgccggcttttcttttcgccttatttatccaatttatcgattaaatagagaaaagctaactatcctttaagaaatcttcgacatcacaaaaaaaatcaactaacttactgataaataataagaaaacacataatcacccatgtcgatagacactatcatcgcacttcgtttttaaatcgacttatccgaactgaaaatgactccaacgcaatcgacaacccactcggagtcaccgtcatgaaagcttccctgatcctcggcctcgccctcgccaccctgaccgccaacgccgccttcgccgccgatggctccagccgcaccatcgaccggctgcaccaggacatgtccagcgtcgaactgcgcatcgccgacaacggcagcgagcagaccgtcgaccgcctgcacaaggacatgaccaaggccgaagcccgcctggccgacaacggcagcgaacagaccgtggaccgcctgcatcgcagcatgagccgtttcgacctgcgcaccgcctgaccgctcgctacgccgcaaggcgcgagaaaagcccggctcgatgccgggctttcctattttcccatccctgtcgcgctgggcgcatggcccgaggcaagccgcactctcccgcctcagactccgctgaaccagttgtagccctggtcctcccagtaacctccgggattgctgttgctgacgaagatctccaccacgtgcttggcgttcttgaagccgagcttggtgggaatccgcaggcgcagcggatagccgttctcctccggcagcgcctgcccggacatctccagcgccagcagggtctgcggatgcagcgcgctgggcatgtcgaggctggagtagtagcggtcggcgcacttgaagccaacgtacttcgccgaggtgtcggcgccgaccagctccaggaaggtgcgcagcggcactccgctccactggccgatcgcgctccagccctcgatgcagatcagttgcgtgacctggctggcctgcggcagccggcgcagttgctccaggctccaggggcgcttgtcgcggacccgcccggaaacctgcaggcggtattccggcaggtcgatctccggcacgttgtaggccgggtagaacgcgttgaaggggaacggcgaggccacctgcgacggatcgaaggtcggcgccagccgcgtacggctgaacagccaggcctggacccggtcgttccagcgcgacatggcccagagtaccttgtcgaccgaatcgccatcctgtagccggcaccccgagagcatcgccagggcgcccagggacaggccgccgcgcaacagcaggcggcgttgcaaatcgaccatctgccgctcgctggacgggtcgaccgcgatcttcgcgcgcttcttctccggccccttcatccttcgctcctccgtccgcgccgccactcgcgtccgatgatcatcggcagcagggtgcgcggcaccaacagcaccagcagcaggtgcacgacgacgaacccgacgaccccggccatggccaggaaatgcacccagcgcgcaccctggaagccaccgaacagcgcggtcagcccgtgcagttgcaccggtttccagatcgccagcccggacagcaccagcagcgcaccgagcgccaggaccagccagtacagcaggcgctgcaccgcgttgtagcggcccggctcatggaccaggcgcaggccgagggcgaggcgcaggtcgcgccagacgccggccgcgctcaaaggcaggaagtcgcgacgaaaatgcccgctggacagtccgtaggcgaggtagcacaggccgttgccgagcagcagccacatggcggcgagatgccaggcgatggaaccgccgagccagccgccgagggtcgcccaggcgggaaaacggaaatccagcagcggcgaagcgttgtagatgccccagccgctgccgatcaggcaggccatggcataggcattgagccagtggcagagtctcaccggccaggcgtgcaacgcacggttcatggcttttctcccaggaaacccggccgggacggacgcgccgtcccggcgaaacctcacatcggcggggtcacgccgtccttgccgaccgagatggccagggcggtgaggctgccgtcggcgcccttctgcgggaacagcacgaccttggcgccaggcttgagcaggctgcgctcgcccggctccaggctgacgatgggcacgtcgtccggcaccaccacggtcttctcgccatcgccgtatttcacggtcatgcgccggccctggctgaccaccaggttgccgaccgtaccgttggtcatggtcgaggcgctgccatcggcgttctcccagggccggtggccttcgccgctgccgcgcaggctgggggcgaagacatgcacctcgagggccttcagggtgccgtcgggctgcggcacggcggcagtgccgatgaagctgtcgggctggatgtcctccggcttcgccagcgacacggcgcggatcgcggtcttgtcggtgagcctgaccgtcagttgctggccgttgcgggccttcagttgcaggtggtcgtcggcggcctgctggatggtgccgcgcagcggctgcagcatgcccgcaggcggttgcgcggcgaagctggcggcactggccaggagcaggccgaagagcagcgcgggggaagccttgagtcgaagcatcggtcgatcctcggtggggttgagcctcgatggtcgccccgccggcggtacccggagatgactttcgcatgacaaaaatgtcaccgagtccgcgccgcgcgctggctagaatggcggcgaacgagggggaacgagacatgcgcatcctagtgatcgaagacgatacgaagaccggcgagtacctgaagaagggcctcggcgagtcgggctatgcggtcgactggtcgcagcacggcgccgacggtctctacctggcgctggagaaccgctacgacctggtggtcctcgacgtgatgctgcccggcctggacggttggcagatcatggaagtgctgcgcaagaagcacgatgtgccggtgctcttcctcaccgcccgcgaccagctgcaagaccgtatccgcggcctcgaactgggtgctgacgactacctggtgaaacccttctccttcaccgagttgctgctgcgtatccgtaccctgctgcgccgcggcgtggtccgcgaggcagagcaggtgcaactggccgatctgcagctggacgtgctgcggcgcaaggtcagccgccaggggcaggtgatcgccctgaccaacaaggagttcgccctcctgcacctgctgatgcgccgcgagggcgaggtgctgtcgcgcaccctgatcgcctcggaggtctgggacatgaacttcgacagcgacaccaacgtcgtcgacgtggcgatcaagcgcctgcgcgccaaggtcgacaatcccttcccgaacaagctgatccataccgtgcgcggcatcggttacgtctgcgaggagcgcccgtgcccgcccgccgctccctgaccctctacgcggcgctgctgttcgccgcggtggcggcgctggtggtcagcgcggtcggcttctacctgtaccgctcggtggaagaggcgatgctgcggcgcagcgacgtgatggtcgccggccgggtcgagcacttccgcaacctgctgcgcgacaacctcaccctggccgagctgaaggcgcgcccgcgtctgttcgagaacatgctcggcaacgagcaggacatcctgctcctcggtcagcccggcgaggcgccgatcgtcgcggtcaacccgcgccacgaacgcctgccgtcgctacgggtggtcgccgccggccaggcgttgaatccgtccgtcgtgcacgccgcgctgacccacgacggcatcccgatgcgcgtgctcgccgccgaggtcctggtcggcggccgcgagccgttgcagatcaccgccgcacacctgctgctgggcgagacgcggatgctcgcccagtaccgcgaccgggtcatcgccgccgtgctgctggcgttccttggcaccgccctgctcggctggctggtcctgcgccacggcctgcgcccgctgcgcacgctggcggcgaaggcggcggagatccatccgaccagcctggatacccgcctcgacgtcgccgccgcgcctgccgagttgcagcaggtggcacagtcgttcaacgccatgctcgaacgcctagacgacggctaccagcgtctgcagcagttctccgccgacctcgcccatgagatccgcacgcccatcggttcgctgatgggccacggccaggtggccctgcgccagccgcgcagcaacgaggagtaccaggcgctgatcgcctccaaccaggaagagctggagcgcatcgcgcggatggtcgagagcatcctgttcctcgctcgcgccgacgacgtacgggcagcggtggagcgcagccgcctggacctgggcgaagaactgcggcgccaggcggagtatttcgaagggctggccgaggaacgtgggctgagcctcgacgtccaggtcagcggccagctacgcgccgatccgcaactgttccgccgggcgctgagcaacctgctggccaacgccatccgctacgccagcgccgacagcctgatcgaagtgcgcggcctgcgccgatcgggggaattcctgctgagcgtggagaacgcctgcgacaggctgccggccgaaccgctgtcgcgcctgttcgaccgtttctaccgtggcgacgccgcgcgcagcgacgcccagtccagcggtctcggcctggccatcgtccaggcgatcatgcgcctgcacggcggccgcgccgaagcgagtgcaccggctccgggacgcatccgcttcgacctggcgttcccggctcaggactgagcgggtttctcgccggcgtccggctcgccgtcggagcggccgatattcgccggcgcctccaccaccagctcctccggcacttcctcgacgcgcgggtcgagggtggcggccatcgggctgaccgtgtccggcatcgccacgtgttgcagcggcgcctcgtcgacccggtgttcgccggtgacgcgcttgggctgcacccagaacaccagcagcaccgcgtagccggacaccagcatgtagaacagtcccggaccgaagtggcgcatcagcgcgccggccaccagcggaccgatacaggcgccgaccccgtaggtggtcaggagcatcgccgacaacgcgacccggcgcggctgctcgacgtggtcgttggccagcgccaccgccagcggatagagggtgaacagcagcatgccggtaacgaacccgttggccagcagcaaccagtacggcagcgtcaccagcccccacatcgggatcgaggccaggcacagcagcaccgcattgccgcggatcagccaactgcggtcgaggcggtcggacagccaacccagcggccactgcgcacagaagccggcgacgatgcacatgccgacgaagaaactcgattgcgaggcatccaggccgttgcggttggcgtagaccggcgccaggccgtagaaggcgccgaccatcaggccggcgatgaagatggtgcccagcgcctgcggcacgcgctgccagaagaaacgcacttccagcggcgcggcgaccagcttggccgggtgcacgcgccgggtcatggccagcgggatcaggcacgaggcgaagcagatggcgaccagcagcagcggcttgtagtcgagggtcgggctcagcgccagcaggccctggccgagcaccaggccaaggtcgacggcgaccatgtagccggcgaacaccttgccgcgctggtggctctcggcctgctcgttgagccagctctcgatcaccatgtactggttcatcatcaccgcgccggtgatgaagcgcagcagcagccagacttccagctgatcgaccagggcatgcagcagcacggtcacggtggcaatcccggcgcaagccacgtaggaacggatatggccgaagctggcgatcagcttgtgtccgaattttccaccgcagaccaggccgaaatagtaggacgccatcagcccgccgacccacaggtcgcctgcgccttcctgggtcaggcgcaggccgatgtaggtggtgaacaggccggagccggccagcatgagcagggtggcggtgtagagcgcgggaaaggtgacgagcgggctgaacatgacggttcctggacggacgggccccacggccggcatccgccgagcattgttagattcgggaaggatcgacgctgctggccgatcgcgggcgcaggacgtcctgcgttcggcgagactccgacgccacgcggcggccggaagccacgtcgcggtgcacagggcggcattatccccgctccggagcggccccgccacgggcgccgcgagcgttccgtcggctcagccgcgccccgccgggaggggctcgcgcggcggcagccgatatacccagatgcgccgcaagacagtgaggaattgccgtcccaggcgtccgctgttgtaggtctgcccgtagcgccgggcgatttcgcggacctcgcgggacaacgcggcgtagcgacgcgccggcaggtccgggtagaggtggtgctcgatctggtggctgaggttgccggtcaggatgtggaacagcggcccgccctccaggttgctggagccgcgcaactggcgcaggtaccagtggccacgggtctctccctccagcaccgagggcgggaagaccaccgccttctcggtgaagtggccgcagaagatcaccgtgaaggtccacaggttgcgcagcacgttggccagcaggttaccgacgaacaccgcgccgaagccgccggcgaacaggccgagaagcgggaacagcaggtagtccttggtccactggcgacccagcttggcacgcaggcggcgtagcagcggcatgagttcggccttgtccaggcgccccttggcgtacttgtccaggcgcagatgctggatcgccaccgcgtactggaacagcagcgcctgcagcgtcacccacagcggttgccagcggtagaacggcttccagcgctgctccgggaacaggcgcacgaccccatagccgacgtcgtcgtccttgcccagcacgttggtgtaggtgtggtggatatggttgtgggtgtgccgccagaagtcggacggcccggcgatgtcccactcgtaggcgcggccggcgaattccggatcgttcatccagtcgtactggccgtgcatgacgttgtggcccagctccatgttctcgaggatcttgcccaggccgagaagcaggctgccgagcagccaggtcggcggcagccagccgaacatcagcagcgccctgccgctccagcagcagacgcgcaccgccgcgcggacccggcggatgtagcgcgcgtcgtccgcgccgagatcggccagggtacgcaggcgcagggcatcgagttcggcgccgaaggccgccagttgttccggggtcagttcgcggtcgtcgcgcatcgcagggctcgcaggtcggttcacaggtccagcgccagatcgccgtgggcggcgctgacgcagaggcggataggctggccgggctcgctgcacagcgcgccgctgcgcaggtcgcgcacacagccgctgagcaggacgcaggtgcaactggcgcagatgccctggcggcaaccgtgggccgggcgcaggccgtgggcctcggcctgttccagcaggctggcggcgctgtcgccggagacttcccgctgcgaccgggcgaagcgcaggcgcacttcgcgcggcgcctccccgctgcgccagcgcgggacgctgaaggattccgtctgcaagccggcgaagcgtgcccccagttgctcgcccaccgcctcgacgaaagccgccggcccgcaggccagggcctggctgcgcgccaggtcggttgcccagccgtccaggtggcgcggctggaaatgcccctccaggcagccatcggcccgcgccccgcgggtcaggctccagcgcaactccaggttcgggtggcgcgccgccagcgcctccagctcgccgagccaggcgcgctggccgggatgacggacgtagtgcagccacagcacgggaccgcgatagccgttctccagcgcctcgcggagcaggccgagcaagggcgtcaggccgctgccggcggccagcaggcagaccgcctcggcctgcatcggccagcgcagatcgccttgcgcgggttgcaactcgacacgctggccgaccgccaggtgttcgcacaaccagggcgagagcagcccgtccgggtgacgcttgacggcgatttccaggcgctcgccgaccacccgggtcaggctgtagctgcgcccgacccgcaccccgtcgcgctccgccagcagctggatgtgctggcccggccgcgccggcggccagccgggggcggtacgcagggccagggcgagcatatcgtcggccacccagtagcgtgcctcgacccgcgcatagtggcggttcaacgacgccagcggatgggcgtggcgcagcaggccgtcgacatcggcctcacgcagccagccacgggcggcgagacggcgcaggggtgcgagcaaaggggtcaggagcgcgaggggaagcaaggccatggaaaatatttcagtgaacgatcgttcacaaaactttgcccgttccgcgcaatcgagtcaacaagcgttcactgatgtatccttcgaccgctgccgtccccggttcgaccgggtcgcagggcttttgctacagtcgccggtccgccaaaggaagccgtatgtcctcaccccgcgccgaacagaaacagcagacccgccacgcgctgatgagcgccgcgcgccacctgatggaaagcgggcgcggcttcggcagcctcagcctgcgcgaagtgacgcgcgccgccggcatcgtcccggccggcttctaccggcacttcagcgacatggaccagctcggcctggcgctggtcgccgaagtcgacgagaccttccgcgccaccctgcgcgcggtgcgccgcaacgagttcgaactgggcgggctgatcgacgcctcggtgcgcatcttcctcgacgcggtcggcgccaaccgctcgcagttcctcttcctcgcccgcgagcaatacggcggctcgttgccgatccgccaggccatcgccagcctgcgccagcgcatcaccgacgatctggccgccgacctggcgctgctgaacaagatgccgcacctcgacggcgcggccctcgacgtgttcgccgacctggtggtgaagaccgtcttcgccacccttccggagctgatcgacccacccgccgccgatctgccgccgcacctgatgccggccgcgaagatcacccaccagctgcgtttcatcatgatcggcggcaagcactggcacggcctgcccggctgaccccgcacctccccagcggacctccggctcggcgttcgtccgcggactagacgcgcgcgcacctttccggtgcggcaaaaaagtcgttgcgcaccaacctggcgcgctgcaatattttgttacatccctatggccccgttttcccggtacaggcgtcccgcatcgacctggcaaggcccttgctggtgcttgttgtgatccctttcctgtcgcattgcggaaactgcccatgctggtcatccaccaacgcctgcccgcccgctcgccccgctgggacgaagaactccacctgacctacgaggcgcgcagcaagagccgcctgcgctgcttcgcggcgagcggcgaggaggtcggcctgttcctcgagcgcggccagcctccgctggccgacggcgactgcctggaggcccgcgacggtcgcctggtgcgggtcgtcgcccgctccgaacgtctgctccacgtcacctgcgccagcccgctggaactgacccgagccgcctaccacctgggcaaccgtcacgtcgccctgcaggtcggcgacggctggctgcgcctgctcgacgactacgtgctgaaagccatgctcgaacagctcggcgccacggtggaggccatcgaggcgccgttccagccggagcacggtgcctacggcggaggccaccaccactcgcaccatggcgaggcggagttcaactacgcgccgcgcctgcaccagttcggcgtgcgccggtgaacagcatctgggcgcgcctgcgcctggccagctcgcagttgccgatcggcggatacagctattcccagggcctggaggcggccctcgacaatggctgggtgcgcgacgccgagagcgcgcggacctggctggtcgaccagctgcaactgaacctggcgcgcttcgaggcgccgctgctggccggcctgctgcgcgccgcgctgatcggcgactgggccgcctgcgatgcggccagcgaacgccatagggccagccgcgagacccgcgagctggcccaggagagccggcagatgggcttttccctgcaccaattgctggaagccctgcccgagctcgacgctcccggccgcgcctggctggcgcgccaggacccgcccaatctcgccgccgcctgggcgatggccgcgcgcgcctggcgcctggacgccgaggaggcgctgagtgcctggttctggagctggctggaaaaccagttggcggtgctgatgaaaaccctgccgctcggccaactggccgcgcagaaacttgcttccagcctgctgccggaactcgaccgcgcctgcgccgaggcgctgcggcggcccgccgtcgagggcagcgccgcgttcggtctggcgctggccagcatgacccacgaaacccagtacagccgtctgttccgttcctaggagaaaccccatgacatcccaacccctgcgtgtcggcatcggcggtccggtgggctccggcaagaccgccctgaccctggccctgtgtcgcgaactgcgcgagcgctacaacctcgcggtggtcaccaacgacatctatacccaggaagacgcggagttcctggtgcgcaacgaggccctcgcccccgagcggatcatcggcgtggaaaccggcggctgcccgcacacggcgatccgcgaggacgcctcgatcaacctggaggcggtggaccagctcaaccggcgcttccccggcctcgaactgatcctggtggaatccggcggcgacaacctgtcggccaccttcagccccgagctgtccgacctgaccctctacgtgatcgacgtttccgccggcgacaagatcccgcgcaagggcggccccggcatctgcaagtcggacctgctggtgatcaacaagatcgacctggcgccgctggtcggcgcctccctcgatgtgatggaccgggacgcccggcgcatgcgcggcgacaagccgttcgtgttcagcaaccagaagaccggccaggggctggacgaaatcatcgccttcatcgagcgccagggcctgctgaccgccgcctgacgccacttcgcaacgacaaggaaccgccaatgaaactgcccaagctgctcgccgccctcgccctgctcgccgctccggcgctggccttcgcccaccccggccacggcgaacacggcctggtcgccggcctcgcccatccgctcaccggcctcgaccacctgctggcgatgttcgccgtcggcctctgggccgcccagcaacagggagccgcgcgcctcgccctgccctgcaccttcgtcggcaccatgctggtcggcgggctgctcggcttcgagggcctgcaactgccattcatggaaaccggcatcgccgcctcggtactcgccctcggcctctgcgtggccctcgccgtgcgcccgccgctgccgctggcgatggccgccaccgcgctgttcgccctggcccacggggtcgcccacggcctggagctgccggccctctccagcccctggctgtacgcgctcggtttcgtcgccgccaccgccgcgctgcacgccgccggctacgcgctggtgcgcttcctgccgcaggcggccgcgcccctggtacgtctcgccgggctggcctcggcgggcgccggggtctggttgctggccggctgagccgccgcgcctcccctcagcgcctgatcagcacccgtcggccttggtgcacgaggcgcaggccatgggtctgtgccagcatcgccagggccagcggcaggtcgtcgacgggaaaggtgccggagacacgaagcgggtccagcgacggctcgcactcgatgctctcgccgccgtagcgcatcagttctcccgcccactgccgcagcggcatgtcgtcggccaccagcaggccctggcgccaggccagcgcggcctcgctggcggactcgacggggccgatccgctggcgatcgaagcgcacccgctggccagcctcgatcacccggccatccgccgcgctcgcggcgccctccggacgcacctggaccgcgccttcgtacaccgccagcactgtctctgcgccctcgcgtcggacgctgaaggcggtacccagcgcgcgcatcaggccctgttcggtgcgcaccaggaacggccgcggcggctcgcgccgatccgccgcggtgcggaggtagatctctccgcgatacaggcgcagcaggcgctggccggcgtcgtagcgcacgtccagcgcgctgtcggtgttcatctcgacctggctgccgtcctccagcaccaggtcgcgccgctcgccgacggcagtgaggtagtcggcgccgaagccgtcgcgccagacctgcgcgcgccatccccaccagaccagcggtgcgccgccgagcagcagggcgaggccgcgcaggacagcgcgccggccgctgccggacggacgctcgagcgcacgccgggccagcgccggcggcagcgaaccgatattcgccagcagacgctcggcgcgccgccaggcgcgctggtgctcggggctgcgcgagcgccaggactccagctcggcctgctgcgccggagccagcggcccctcctgcatcagcagcagccaggaggcggtctccctgagcacctgcggggcgatcgcctcggcggccggcggcccggaaagctccgtatcgcccgcctgcggcgcccggcgggaagcgcggtcattcatcgggcatcaggctcaggcaggtcacgtaggcctggtggatgaacttcttcaccgtcggcagcgcaacgcccagcgcctgggcgatgtccttctgcttcatgccgtccagcgtcgccatcaggaatgcctgtttcacccgcgggcgcagggtgtcgagcagcgcgtcgatctcgtgcagggtctcgacgatcacactctgttgttccggcgacggctgcaacggctcgggcagcgtggccagggcctccagccaggcaagttccagcgattggcgacggcgccaactgaccagcacgcagttggcgatacgggtgagataggcgcgcggctgacggatcgcttcacgctggccgccgtcgcggctggcgagaatgcgcaggaaggtgtcatgggccaggtcgtcggccacgccgcgtccccaggagcggagtcggtaggccagccagttgcgcagccaggcatggttttcacggtagagcgtggcgacgccgtcgcggtccgcggacaggcaggaactcggcgcattcatcggaggcgcattcatcggaatagtcagctggattcaatcgcaaatgaaaactattatcactaattttgcgttgaccacaatgccggcgaccctttccgtccggcccgccgaacccgaaatatcccttttccgatctcgtgcgacagagggaatgagagcccgcaatgccgggcgccaaccctgcgagcgaagaagtcatgtccctacaacgccctatccccagcctggcgcgccccttgtcgcgcctctccccgctcacccttgccctgcgctgggccctgctcggcctgtcggcggccggcgccggcctgctcggcggcggcctggcccacgcgcagagcgtcggccagcacagcgcggctacccgcctggacgacgccacgccgcgcagctacgacatcccggcgggttcgctgggcgcctccctgggcgccttcgccagccagtcgggcctgctgctgtccttcgaccccgagctgacccgcggccgcacggcgccggcgctcaagggtcgctacagcgtactggaaggcttgcagcgagtgctgtcgaacaccggcctgcaggtcgcggcgggaacctccggcgcctacctgctggtcgagccgcgcatgtccggagaagccccggccgacctgtcgccggtggtggtctcggccgccgagctggccgatccgcagaaggaaacctataccgcgccgcgctcgtcggtgtacctctccagcgaagacatcgaccgcttcggccgggtttccgtgggtgacctgctccagggcatcccgggcgtacaggtcggcgacagccgcaacggtggcgcgctggacgtcaacatccgcggcatccaggggcagagccgggtggcggtgcgggtcgacggcgcggagcaggcgctggacgtctaccgcggctacgccggcacccagcagcgcagctacatcgatcccgacctggtcagcagcgtgaccgtcgacaagggtccctcgacccgctcgggcgcgatcggcggcagcgtggaaatgcgcaccatcggcgtcaaggacatcctggtggacggtaaggacctcggcatgcgcttcaccggcaacgtctggaacaacggcgccgccccgcagcaccgcagcgccagttcgaagaccgagaatctcagcagcgtgccgcacgatgaccgcggcagcctgttcggctcccaggccaagtccggcagcgccgccttcgcctaccgcaacgagcatctggacctggtcgccgcctatgcgcagcgcaatcagggcaactacttttccggcaagaaaggccagaaccgctatcgcgtctacaaccgctacggtcgcgaggaaagcagcgtagccaaggtctacaacgcaggagaggaagtgctcaactcgtcgtcggagaccgagtcctacctgctcaaggcgacctggcgcatcgccgacgagcacaccctggacctcggctatcgtcgctacgacgggcgcactggggagatcatgccgtcggacatcttccgtttcggcaccgccggcatctaccagtacccattgagcgaagtgaagatcgacacctacaccgcacgctaccgttacctgcccgagaacaatccgctggtggacctcagcaccggactgtggatgaccgaggcgaagagcgacatgctgacctcggtgctggcgccgcgctcccaggcctatcgctccgatcgcaactggacgcgccaggacaaccggcgcatcggcggcgacctgaacaacgtggcgcgcttcgaaaccgacttcggcgatttcaagctcgacctcggcggctcgttccaggtcgaagacatccagccgcagaaaagcgtggtcaccaccctccacgacatcaacgccaaccgcaccctgagggacgccacccgccaggaatacggcctcaacggcaagctcgagttcaagccggtcgagcgcctgacgctatggggcggcggccgctacagccacttcaacagcaaggacaacggcatctccgcctcgccgcggcgcgaggatcgcgacatgcgcttcatcacggtgagcaggcccggctactacggctcgatgatgtggttccccgaccagaacggccagtacaccgacgccaccgatccccgcctcaacaacggcatcgtcaccaacaacaccaacaatccgttcgaaggcattcccttcgacgagttcggcccggccaacgtgacagtccatccctcgcgggtcaccaacgtggtcaccggctacaactacagcaagaagggcagcagccgcggcggcggtttctcgccggcattcgggatcaatttcgagctggccccggataccttcgtctacgcctcctataccgaaggcctgcgtctgccgtcgctgttcgagaccagccagggcaccctccaggtcgagccgggcaaggacctcaagcccgagcgttcgcgcagctgggagatcggtgccagcgcgctgcgcgacagcctgttggccgacggcgactcggcggcgatcaagctggcctacttcaacaacaccatcaagaactacatcacccgctattacgatccgggccagatgggcctgatgaccttcagcaacaccgatagctaccgcaccagcggtctcgaactgcaatcgcactacgacgcagggcgggtgttcgccgacctgtcggcgacctactacctgaagaccgagacctgcgacgccgccttcgccgccaggctgcgcgccggcgccaaccgctaccagcgcaccgagaacacgccgaactgcacgccgggcagcttcatgggctcctataccaacacgcagaacccgccgcggctggcgaccaacctgaccgccggcctgcgcttcttcgaccaggccctgaccctgggcggacgcatgacctatacctccggccccaccgccacggcggacaagccctggcaggtcggcgccaccacaccgcagatcgagtaccgctcggtgcagctgttcgacctgttcctcaagtacaagctgttcgagcacaccgaactgaatgcctcgctgcagaacctcaccgaccgctattacctggacccgctggcacagagtttcatgcccgcgcccgggcgtaccctgcgggtggggatgcaggcgaagttctgagccgccctctccccctccaggcgttgtcggcggagcgccgctccggtagggcggataaccgcccagcggctatccgccgaagcaccgggcctcccgctccccgtccctccggaactgtccggaggagcggcgagacagcgtccgtcaccacgacaacggataactcaccaccagccgcgtctggtcgaagtcgctgttgaagctgcgtcggttgctggcgtggttgaggcgcacgttgagccgcgccagcggaccgctctgcacggtgtagccgagctcgacatcgcgctcccattccttgccgccgctaccggccttggtggtggcgttcgagccatggccgtagcggaccatgccgatcaggccgggccagccgaggccgacgaaatcgtagtcgtagcgcacctgccaggagcgttcgtcggcgttggtgaagttgccgttgaacatgtcgttgcccatgctccgcccactgctgccgtagaccgattgccagccgctgtcgccgccgaccttctgcaggccaaggtagaaggtgtgcaggccgatgccggcggaaaacaggccgtagacggtatggctgtcgatctctccggcgcgcgcggcgccgtcgtcgcggtcgacgaacaggccgaggttggcgcccagggtccagtcgccgacacgctgcttgtgcagcaggttggcgtagctctgccggtagacgtcctccagttgcccgtgccacaggcccagttgggtgcgctcgcggttgaagcggtactcggcgccggcgtagttgaaaccgtccgatttctgcgtcggcgcgctccaggccgacaggtcctgcatgtccgccgaattgcgcaggctcaccgcgtcgaagcgtccggcctgcagagccaggcccggcagctcgcgggaaaccacggcgaaaccgcggaacgtctgcggcagcaggcgtccgtcgtcgtagcgcaacagcggaatgtccgggagcatctcgccgatcttcagttcgctggccgaaacgcgcagcttggcggccacgccgacgcgcccatagttgtccgccgcgcgaccgtcatcgtgcaacggaagaagctcggaattgctggtgccacgtccgctgttcagcttcacgccgaacaggccgatggcgtcgaggccgacgccgaccgtgcccggggtatagccggaactgaacttgaggatgaagccctgcgcccactcgtccaccaggctcttgccggcatcgtggtcgcggaaatcgcggttgaagtaatagttgcgcaagaccaggtcggtcttcgcatcctccaggaagccgccctcggcagcttgcgcggcaagacaggcgagcatcggcaggaccgcccctgcattgcgcgggactgcggttttacgacggattttcattgttattgtgctccgtttttcagggacgaccgagccccggcagcctctgcgggccacctggcgacgacggtcgggtcagcagcggggcgcgggccccgccgccagggtcagaacgggtactggcgcggcgcgtgctgcacgctgatccagtggtcggtggtgaattcctcgatggcccagtcgccgttgaagcggccaagtccggagttcttctcgccgccgaagggcgcgttggcctcgtcgttcaccggaatgtcgttgacgtgggtcatccccgcgcgaagctggcgggcaaagcgcaccgcgcgttccaggtcgcggctgaacaccgcgctggacagcccgtattcgctggcgttggccaactccagcgcatgcgcctcgtcgcgcgcgcggagcaggccgaccagcgggccgaagatttcatcgcgggcgatctccatcgtcgcggtgacctcgccgaatacgtgcggagccagcaactgcccatcgacgccgccctcgtacagcggcttggcgccttcctggcgggccaggcggatcttttccagcaggccttcgagctggcgcgcgttgacgatcggcccgaccgcggtatcggcgcgctgcggatcgccgacccggaggcccttgacccgctcgacgaagcgcgcggcgaaagcgtcgtagaggctgtcctcgacgatgatgcggttgatcgccatgcagatctgcccctggtggaggaacttgccgaacaccgcggcattcaccgcctgctccagatcggcgtcgccgagcaccacgaacggactgttgccgcccagctccagcgccacgtgcttgaggtgcgcgccgccgctggcgatgcggccgatgttgcggcccaccggggtcgatccggtgaaggtcaccaggcccggcaccgggtgctcgacgaaggcgtcgccgatctcgctgccggggccgaccaccacgctgaacagcccggccggcagcccggcctcttcgaagatccgcgccagcagcagtccgccgcagaccggcgtgtcgctggccggcttgaccaccaccgcgttgcccagcgccagggccggggcgatggaacgctgggtcaggtgcagcgggaagttccacgggctgatcaccccgaccacgccgatggcgctgcggtagacccggctttccttgcccggcacgtcggactcgacgatgcgcccgtgcacccgtgccgggaacgacgccgactccagggtgatcgcgcgcgccgcgccccattcgatctcggccttcaggcgggtgctgccggactcgcggatgatccagtcgacgatctcctcgtggcggcggtcgaacacctccaccgccttgtacagtaccgccgcgcgtgccgagggcccgagcgcggcccatgccggctggacctcggcggccttggcgtaggcggcatcgaggtcgtcgcggtcggcctgctcgatctccagcagcaggctgccgtcgaacgggttgctcaccttcagccggcggccggcccggccgtggcgccactcgccggccaggggctggagaccgaggtcggtataacgggaatcgctcatcgctcttctcctctttcgaaaatcacaggggtttcttcgccgtcgcgtcgacggacgcttccgccggcacgcgcggccgcaggtggatgcaggcgatcgccagcgcgccgatcacgccgggcgcggcgaaggccaggaagttctgctggaacggcagctccagggccagcaggctgccgccgagcatcggcccggcgatggcgccgaggcggccgacgccggcggcccagccgaccccggtggagcgcacccaggccggatagaactgcgcggcgtaggcatggatcaccgccagggtgccgatggtggtggcgccggccaccaccagcaggccgttgagcagccaggggcctggccccaggccgagggccgccagggaggccgcggccagggcgaagaacagcaccagggtgcggccggcgccgaggcggtcggccagccagccgccgaacaacgcaccgagggtcgccccgacattcagggtgacgaggaacgccaggctcgaaccgagggcgtagccgccgccggccatcagtttcggcaaccaggtgttgagcccgtagctcatcagcatgcacatggcgaaggccacccacagcagcagggtgcccactgcctggcgcccctcgaacaactgggcgacccgtccgctcggcgcttcggccgcgacagcgttcgcccgctcggcgccgggccggtagtcgggatcgaccttgcgcagcagcgcgtccagttcggcgcggcggcccttgagttcgaggaacgccgccgactccggcaaccagcgcaacatcagcggcaccgccagcaccggcagcaccgccacgtagaacaccgattgccagccccaggcggggatcatggcgatcgccagtagcgccgagagcaccgcgcccaccgagtagaaggccgacatcaccgtgaccagggtgctgcgccgcccggccggggcgaattcgctgatcaggttgatcgcgctgggcaccagcgcgcccagtgccaggccggtgaagaagcgtccggcgcccagttccagcgggtcgcgggcgtgcccggtgaggaaggcggcgaggctcgccagcagggtggtggcgatcaccaggcggcgccggccgaaacggtccgccagcggcgccagcagggtgccgccgaagagcatgccgaacagcgcgcaactgccgagggtgccggcctgcaccgggctcagctgccactcctgcatcaggcgtggcaccaccgagccatagatgaccatgtcgtagccgtcgaacagcatgatgaaacacccccagccgaggatcagccagtgagtacggttaaagcgggcagcgtcgatcaccgccgcagcggattgcctgttcataccaacctctctcttgttcttgttatgggcgcacgcgggcgtcggtcggcaccgcccactctggcatggggcggcgccgtggaacatcagggttcgatggtttgcgtcggcacctcgatcaaaaccgggcgatcagcggccagggcatgcttcaaggcgctttccagctcttcgcgggtggctgcgtggagcgcctcgacgccatagccgcgggcgatcgcgcagaagtccaggccgggcacgtcgagccccggcgcatcgggcacctcgagcaccccggcgaaccagcgcagggcgccgtaggtaccgttcttgaggatgatgaacaccgccggcacgcggtattgcgcggcgctccagagcgcggtgatgccgtagttggccgagccgtcgccgatgatcccgatcacctgccgccgcggctgcgccagttgcgcgccgaccgccgccggcaggccgaagccgaggccgccggcggccgggaagaagtagctgcccggctcgcgcatctccacgcgctgccagaaggcggtcacggtggaagtcgactccttgacgaagatggcgtcgcgcggcgccagcgcatcgatcacgtcgaacacggtttccggacgcagcggtccgccctcctcggccagcgccggcggtcgcggcagcgcctcgggcaacggccgcgcactggggcggacctgttcgagcagtgcctcgagggtcagcgcgatgtcgccgaccaacgcgtcgcccatcggcgcccgtgccgcttcgccgggatcgcaggtgacctgcaccagctcggcgccggccggcaggtaatcgccgggggcgaactggtgatagcggaacaccggcgcgccgaccaccaggatcaggtcgtggccgtccagcagccggctgatcccggcgatggccgccggcagcacgccgcggaagcaggcatggcgggtggggaacggacaacgcgaggccgacggcgcgacccaggccggcatccgcagcttctccgccagttccacggccaggccgttggcattcgccccgtcgacgtccggaccgagcaccagcaccgggttgcgcgagcgcgacaggcgctcgccgagttcggccagcaatgccggcgcgggcagcgcggcgccgctgacctggcgcgcagccaggtgttcgacgccggccggcgccggttgcgcccagtcgtcgtagggaatcgacaggtacaccggcgcccgcggcggcaggctggcggtctggatcgcctggctcagcgcgcgcggtacatcctgggcgcaggccggctcgtggctccatttcaccagcggcttgggcagttgtccggcatcgacgttggcgagcatcgcctcgaccccgatcatcgagcgcacctgctgcccggcggtgatgaccagggggctatgggagtaccaggcgttggtcagggcacccataccgttgccggtgccagccgccgcatgcaggttgacgaaggccgggcggccgctggccagggcgaagccatcggccatgccgaccaccgcgccctcgtgcaggccgaggatgtagcggaaatcctcggggaagtccttgaggaacggcagctcgttggagccggggttgccgaagacggtggtcaggccgtggcgacggaggatctcgtaagacgcggaatggacggttttcatgcaggccttcaagctcgtttcctggatttgcgctactgttgcagccgctcgataatcaatcaaatcgatactctttctataaaaaatagaactggtctatatgagtccgatcgatctcaacctgatccgcaccttcgtcaccctctacgaagccggcagcgtgaccctcgccgcggagcgcctgttcgtcacccagccatcggtgagctacgccctggcgcgcctgcgcgaactgttcgacgacgcgttgttcacccgcacccgcgacggcatccagccgaccttcgtcgccgagcagctctacggcaccttccgcgagtcgctgacgcgcatcgagggcgcggtacagagcgttcgccacttcgatccggcgaccaccgagcgacgtttccgcatcgccctcaccgatctcggcgaagtgggtttcctctcgctgatcctcgaacgcctgacccgcgacgcgccgttcgccgaagtggaagtgctgccgctgcaggtggacgaggtcggcgcctggctgagcagcgccaaggtcgacgcggcgatttgccgccagccggtgcccggcgcgcgcagccagcgggtcctgcacgagcgctacgtgtgcctgctcagcgaccgccacccgcggatcggcgacagcctgagcctggagcagtacctggccgagcggcacatcgtggtgacccgtacctccggccacggcatcgccgaggacgtgctcgaggccatgcaggtgcagcgccgcatcagcctgcgggtgccgcacttctcggtgctgccgaagatcattcccggtaccgagctgctgaccatcctgccggcgcagatcgcctatcgcttcgtcgccgaaggcggcatgcgcatgctcgaactgcccttcaccctgccgccgttcgacgtctccctgcactggcacgagagcagcgaacgctcggcggcactgaactggttccgcaccaccatcgccgaggcgatcatcgccgcccaacgctgaaacgccggcggccctcacgcagcgtctcccagcgtcggcgagcgctcgcgacgccgcgcaccgagcagcggcaacacggcggccgcggcgacgaacaccgccgcgaacgccccatagagggacagcggctgccagccgtcgtcgagcaggagcccggccaccagcggcgagaggatcgccccgccgcgaccgacgccgatcccccagccgaccccggtggcgcgcaccgaagcgtcgtagaggctcggcgccagggcatacaggccggccacgcaggcgttggcgcaaagcccgatcagcagtcccagcggcaaggccgcgccgggcagcccggcgctcagcgagaacagcgcgagcagagcggcggtaagcagcatgaacagcgccagcacccgttccaggcgaaagcgcgcggcaagcccgccgagcaaggcggcaccgaagatcccgccgatgctcagcagggtgccgccggtgatgccctgggcggtggacaggccggcggcgaccagcagcttcggcgtccagctcatgatgaagtagaagccgaacatcaccaggaaaaacagcgcccagagcagcagcgtggtacgtcgctgggcaacgcaaagcaaccgggcgaggcggctaccgtgctccgctccgccaccgggcgggctcggcagttccgcgagcgccgcgcggcccaggcgccgggccagcgcgttgacccgttgcaacgcccgcggcggccggcgcgccaggaggaagtccagcgactccggcaggcacaggcagaccagcgggatcaccgccagggtcaggccagcgccgaagacgaacaccgagcgccagccccaggcgccgatcagccataccgcgagcagtccgccaagggtcgcgccgagcgcgtagccggtggactgcaggcttaccgccaggccgcgccagcggcgcgaggcgtactcgctggcgatcacgttgctgctggcgaggatgccgccgatacccagtccggtcagcccgcgcagcaacgccagttgccaggccgcctggctcagcgccgaggcgagcatgcccaggcccgacagcgccaggcaggcgaggatcagcgggcggcgcccccagcggtcggcccagggcgcgatgaacagcgagccggcggccatgccaaagaggccggcgctgagcagcaggccgatctcggcgccgccaaggttccattcggcggccaccgaggatgcggtgaaggccatcaccagcacgtcgaagccatcgatcaggttgagcacgatgcacacagccaccgccagccactggaccggacgcatcggttcgtcgtcgagagcgcggcgcaagtcccggttcatgggcggccctccccgagcggacaggaaagaagcgacggcaggcgggagcgaggcgcgggaatgcaggaatccatcatcgggaagaccctttttcttgttgttgtaggcacggcaagcgcaggcaccctggcaccgttgcgtcgatgccgcaatcctattggatccattttggcgacaagaaaacggatggccagcggatatcccactgtcagcgaaatccgagaaaggctctggaacgagataatttggcaatttattcctgaagttttttatgtgcgactatcgaacagattattttttgtacagaagcggttgacttggaaaagttgcctcgcgaatcattggatccaattacaaaaacaacgagaggatccgacgatgtttccgaagaacgcctggtacgtggcctgcacccccgacgaactggccggcaagccgctcggccgacgcatctgcgacgagccgatggttttctaccgaggcgaggacggccgcgtggcggccctcgaggatttctgcccgcaccgtggcgcgccgctgtcgctgggcttcgtcgaggacggcgtgctggtctgcggctaccacggcctggcaatgggcgaggacggtcgcacccgcgcgatgcccggccagcgggtccgcggcttcccctgcatccgtcgcttcccggtgcaggaacggcacggcttcgtctgggtctggccgggcgcggaagaacaggccgacgccgcgctgataccccgcctggaatgggcggaaagccccgattgggcctatggcggcgggctgtaccacatccactgcgactatcgcctgatgatcgataacctgatggacctgacccacgagacctatgtccatgcgtccagcatcggccagaaggaaatcgacgaggccgcgccgaccacgcgggtggaaggcgacgaggtgatcaccagccgccacatgcagaatgtcatggccccgccgttctggcgcatggctctgcgcggcaacggcctggccgacgacgtggcggtggaccgctggcagatctgccgcttcacgccgcccagccacgtgctgatcgaggtcggcgtggcccacgccggccacggcggctaccaggcgccggcggagcgcaaggcggcgagcatcgtggtcgacttcatcaccccggagagcgccacttccatctggtacttctggggcatggcgcgcaacttccaggcccacgaccaggcgctcaccgagagcattcgcgaaggccagggaaggatcttcggcgaagacctggaaatgctcgaaagccagcagcgcaacctgctgcgccatccacggcgcgacctgctgaaactgaacatcgacgccggcggcgtgcaggcccggcgcatcatcgagcgcctgctggcggacgagcgccaggccgccgcccccaaccgcgcccaggcctgacgggagccttcgccatgatcgaggtcatcgtcggcgccatccgcctggaggcgcaggatatccacagcttcgaactgttccgggccgacggggcggccctgccgtccttcgagccgggcgcacacatcgacctgcacctgcccaacggcctggtccgccagtactccctctgcggccccgccgaacggccgcgccactaccgtatcgccgtactccgctgccgcgactcgcgcggcggctcggccacgctgcacgccgaactgcgggtcggccagcggctgcgcatcggcgagccgcgcaatctcttcccgctgtcgccggagcccggtccgcgtctgctgttcgccggcggcatcggcatcacgccgctgctggcgatggccgaacgcctggcccgcgatggcgccgacttccagttgcactactgcgcgcattccgccgagcgcgcggccttcgtcgactaccttggccggtgcgccttcgccgaccgcgtgcactgccacttcgaccacggcgaaagcagccggcgcgcggaccttcgcgccctgctggcgaccagtccgcgcgacgcccagctatacctttgcgggccggcgggcttcatgcagtggatcgaagaaagcgcccgcgaactgggctgggaagcaagccgcttgcatcgcgagcacttcgccgccgcgccacgagacgccagtgcggacggcaccttcgaagtgcagttggcgagcaacggagcgctgatccgggtcgccgccgggcagaccgtgctggcggccctgcgcgaagccggggtggacctgccggcctcctgcgagcagggcatctgcggcacctgcctgacccgcgtgctggacggcgagccggagcatcgcgacctctacctcagcgaagaggagcaggccgccaacgattgcttcacgccctgctgttcgcgttcgcgcagcccacggctggtgctggatctctagtcggcggcgacgtcgccgtgaagcacggtgacaccctgccgcgccggatcgaagtagtcggcgtagcgcagggtcgcgttggcgtgctcgcgcatgatcgcctcggcgcgcgccccctggccgttgaccagcgcgtcgaccaccgcgtggtgctgcatgtgggcgaagttgaaacggcggaattcctgctcgagattgtcgcgatccaccgccagggcgctcaccgaggcgaacggcaggtggtcgttgcgcgccagcgccacggcgatcgccgggttgccgctggcctcgatgatggtgcggtggaaacgcatgttcatgcgctggtagcgctccagctcctccagcaggacctggccgttggcgaacaatcggtcgccctcggccaggcattcctccagggtcgcccgtgcctcggcggacagcccgcgctcggccgcctggcgtgccgccaggccttccagaacgccgcgcacctcgaccgcgccggcgatatcctcgcgggtcaccgcgcgcaccctgtagccgcgcccggtcttgcacagcaggccttcctgctcgagggtacgcagggcgatgcgcaccggcatgcgcgagacctgcaggcgttcggcggtgggaatctcgacgatgcgctcgccggcggcgagttcgccggaagcgatcagcttgcgtagctcggccagcacgcgttggcccggtttgctcatggaattcgcttattcgatcgggacgtccggggcatcatagcgtgccccggccgcctccgccggtcagctttcgcggtggatggcgaagccggcccaggactggctcaccggcatgatctcgaggctgttgatgttcaggtgggcgggctggttcatgatccagaagatggtctcggcgatgtcttccggctggatcggatgggctccggcgtaggtcttgtcgtagcgcgcctggtcgccgccgaagcggaccagggagaactcgctctcgcacaaccccggctcgaggttggtcacgcgcaccccggtgccctgcaggtcgcaacgcaggttcagggagaattgctcgacgaaagccttggtgccgccgtagacatggctacccggatagggccacttgccggccaccgaacccaggttgacgatgctcgccccggcgccgtgggcgatcagccgcggcagcagcaggcgcgtgctgtagagcaggcccttgatgttggtgtcgaccatggtgtcccagtcgtccaggtcgcaggactgcgccgggtcggtgcccagcgccaggccggcgttgttgatcaggccgcgcagggtggcgaactcttccggcaggttgtccacggccgcgctcatcgccgcgcggtcgcgcacgtccagggtcagcggcaacacccgggtcttcgccgaaagctcaccggccagggcttgcagacgctcctcgcgacggccggtgagcaccagcgaccagccggcctcggcgaaacgacgggcgcaggcttcgccgaagcctgaggtggcgccggtgatgaacagggtggacgacatgggcatctcctcgtacggggcggaaaaacgatgtccggggattctagagcctcgccgtgcccggttggccatacagttgcgcacgagtttgccgaggcgtctgctcaaaaaacgaccaacctcgcggaacccgcaccgtgcctgggccgcagcgaacagccaccaacttgtccacagggcgtcgcacagttttcctgaacaactgtggcagcgggatgaccacgcgttggggataagtacctggcgcgagcgctgttcattttctgaccagccacgcataaccctcgccgattcgggggtttggcggttcttacccaccttatccacaagcccccgcacagaaatcctgaacaacctcaggcggcgttatccacaacccggcgcgcggcgaccaggtcctccagcgcataacccaccgacttgaacagggtgatttccccgggatcgccgcgccgccctgccccgctcagcaagtcgcgcagttcggtggatatcgcctcgcgcccgatggcgccttcggcgatcgcctgcaacaggtcgccggcctcttccagcgcgcctgcgcgggtatccaccacgacccgcgcgcgcgccaccgccagggcgtcggtctcgcgcatggacggcaggaaggcgccgaccaggtcgagatggacgcccggcttcagccatgcgccgcgcaccagcgcttcgcgggaggtggtaacgcaactgacgcagtcggccgcctccaccgccgcgcgcaacccgtcggccgctcgcgccgggtagccctcctcgcgcagccgggcggccagcgcggctgccttggccggatcgcggccccagatgtcgatgtggcgatagtcgcgcacgcaggcgtgggcccgcaccatgtgcgcagccagggttccgcagccgaccaccagcaggcgccgcgcatcgtcccgcgccaggtagtcggcggccagcgccgagctgcaggcggtacgccgggcggtcagctccgaagcctccagcaacgccagtgggcgaccgtcttcgccgtcgaacagagcgaacaccgcggccaccgccggcaggccacgcgccccattgccagggaacaccgtcaccagtttcacgccgatccccgcgccggcttgccacaccggcatctgtagcagcgaggcctgcgccggcaaggcatggcagttgcgcagcggcgcgctgcaaggcttggccaggccgatgcgcaacgcctcgatcagttgtggataagccaggcgctcggcgacctcggcgttgctgaaaaagcgcaggctgtgcataagtcgagtttcctccgtggctccagggcagcgcccgccccggcggccaggcagccggggcggggcgtgctcaatgtccgccgagataggcgttgcgcacctcctggttgccgagcagttcttcgccgctgccgctcatgcggatttccccggtgaccatcacgtaggcgcggtcggagagcttcagcgcatggttggcgttctgctcgacgaggaagatggtcatgccgctcctggccagctcgcgcagggtctggaagatctgcttgaccacgatcggcgccaggcccagggagggctcgtcgagcaacagcaacttcggccggctcatcagcgcgcgggcgatggcgagcatctgctgctcgccgccggacatggtcatggcgcgctggttgcgccgctccttcaggcgcgggaacagctcgaacatgcgctgcatgtcctcctcggcgtggtccatgccgatgggaatggtacccatcagcaggttttcctcgacgctcatgtcggggaacacccggcgtccttccggcgactgcgcgatgccgttggacgccacgtagtgcgccgacttctggcggatgtcctggccgcgatagaggatctgcccggccgccgcgcgcggctggccgaagatcgacatcaacagcgtcgacttgcccgcgccgttggcgccgatcaggctcaccgtctcgccctcgttgacctgcagcgagaccttcttcagcgcctggatcggcccgtagaacacgtccacctcacggaattccagcaacgccgcgctcatgacagctcctcttcgtcggcaccgagataggcggcgatcaccttctcgtcatggcggatctgttcggggttgccacgggcgatcacgtcgccgtggtcgagtacgatgatgtggtcggagatgttcatcaccatgcccatgtcatgctcgatcagcagtacggtgatcccgtggtggtcgcgcaggtagcggacgatgttgctcagggcgtgggtctcggccgggttgaggccggcggccggttcgtccaggcagatgagttccggccgcgtgcacatggcccgggcgatctccaggcgccgctgctggccgtaggacatctcgccggccaggcggttggcgcagtccaccaggtcgaccacctccagccagtagaacgcgtggtccagcgcctcgctctcggcgcggcgatagccgggagtgttgaggatgccggcgagcaggttgcggttgacgaacatgtgctgcgccaccagcaggttctccaccaccgacatgtccttgaacaggcggatgttctggaaggtccgcgccagcccggcgcggttcaccaggtgggtgccgccgaacatcttgtagtagaggcgactgcccagttgcggcggcttgacgaagtcgtccagctggaacggctcgccgagcacctggatgacgtccgtggtgcgcccctgggtgttgagcaggatgttgccgccggtggccttgtagaagccggtgagacagttgaacacggtggtcttgccggcgccgttggggccgatcagcgcggtgatcgaaccgcgctcgacgtcgaggttgacgtcgttgagcgccttgatgccgccgaagtgcatcatcaggtgctcgacgctgaggatcttgtcgctcatggcgccacccccttgcgcggggcgaagcccacccggctgatgcggatcagcccgcgcggccgccagatcatcatcaccaccatgagtatcccgagcagcagcacgcggatgtcggcgaagctgcgcagcagctccggcgccacggtgaggacgaaggcggcgatcaccaccccgaccgtcgagcccatgccgccgagcacgacgatggcgaggatcagcgccgactcgaagaagttgaacgaggacgggttgacgaagccctggtagctggcgaagaacaccccggccagtcccgcggtggaggcgccgagcatgaacgccgagagtttcaccagcacatggttgaggcccatcgcgcgacaggcgatctcgtcctcgcgcagcgcctcccaggcgcgcccgaccggcatccgggtcagccggtgcttgatgtagagcaccagcagcacgaccaggaacagcaccacgtagatgaacaggaacttcatgttggggttgtaggcgatgccgaggaactcgtggatcggcaccccgccatccttggcccggcggccgaactccaggccgaggaaggtcggcgccggcgccggcatgccgttcggcccgccggtgaaggacagccagttgttcagtaccaggcggatgatctcgccgaagcccagggtgacgatcgccaggtagtcgccatgcatgcgcaacaccgggaagccgaggatcgcgccggccaccgcggcggtcagcgcggccagcggcaggacggtccagaagcccaggccgaggtactggtagcccagcgccaggccataggcgccgatggcgtagaaggccacgtagccgaggtcgagcagcccggcgaggccgaccacgatgttcaggcccaggcccagcagcacgtagatcaggccgaggatgaccaccgccagcaggtacttgctggcgaagaacgggaagatcaccgcggccaccaggatcagcggcacgatccagcgcaagcgggtcttgtagcccggcggcaggacgtggacgccgctgccagccccctcgaagcgctccagcacggcgcgcccgccgcgggtctgcaggtagaggctgagcaggaagcgcccggccatcacgatcgcgatgatccagccgacccgctcgtaatgcaggttgaagccgtagccgtcgaggaccacgccgacgatggggccgaacaccaccagggcgatcaacccggagagcacggcatcgaggacgcactgcttgagatcgatggaagtctcgttgctcatcgtcgtccccttacaccttggcgatctgcgggcggccgagcaggccctggggacggaagatcaggatcagtaccagcaacgagaaggcgaacacgtccttgtagtcggtgttgaccatccccgagaactgcgcctcggccactcccagcaccaggccgccgagcatcgccccgggcagcgagccgatgccgccgagcaccgccgcggtgaacgccttgatgccgatgatgaagccggcgtagaagtcgaaggtgccgtagttcatggtgatcagcaccccggccagggcggccatcgccgcgccgatgacgaacacgtaggagatcacccggtcggtgttgatccccaggatcgaagccatcttgcggtcctgctgggtcgcccggcacatgcgcccgagcttggtgtagcggatcacgtaggtcagcaccgccatgccgatcagcgaagcgatcaggatgaacagcttggtgtaggtgagctggacgaaaccgtcgccgacgtggaatttcagggcgccgtcgagcagggtcgggatcccctgctggcgcggtccctgcgccacctgcacgtagttctgcaggatcagcgacatgccgatcgccgagatcagcggcgccaggcgcgtggagttgcgcagcggcttgtaggcgatgcgctcgatcacccagccgtaggtgcaggtcaccagcacggtgaacagcaaggtgccgaggatcagcagcgggaagttctgcaggccgaagaaggccagcagggcaagggcgatggccgacaggtaggcggagatcatgtacacctcgccgtgggcgaagttgatcatgccgatgatgccgtagaccatggtgtagccgatggcgatgaggccgtagaccgagccgagggtcagcccgttgatcatttgctggaggaagatgccgtccatttttcagtctcttcagggcgaatcgcgacggcctttgtaaggcgcgccggcgctcgccggtgaaagcggacgggtgctactgaaacggccccggatcgcgggactccagaccgaccacacgcagacgtcttcggtgaatccgcactacggcggcaagcacgggcgagcacttcagcagctcccggacttacccatgcgccgggcctgtgcccggcgcatggcggtcgagcgcgatcagggcaactggtggtacttgcccttgtcgtcccactcgtagaccacgtagtcggagactttcaggtcgcccttcttgtcccattccttcttgcccatcacggtctgcaccggatgcgacttcagccactcggcggccttggccggatcgttggcgccggcgccgttgaaggccgccgccagggactggatcgaggcgtaggagtagagggtgtagccttccggctcgaaaccgccggcacggaacttctccaccaccgccttgccgtcggggatcagccgcgggtcggcgccgaaggtcatcagcacgcccttgacgtactgcggaccgccggcggtggtcgccagttcgtcggtgaccacgccgtcgtcggacatgaacttggcggtcagtccctgttcgcgcatctgccgtaccagcggaccggcttccggatgcaggccgccgaagtagacgacctcggcaccggaggcgcggatcttggtgaccagcgcgttgaagtccttctcgccgcgagtcaggccctcgtagagaacctctttcacgccgagcttgttcagttgcgccctggtggcgtccgccaggccctggccgtaggtgtccttgtcatggatcaccgcgaccttcttggccttgagcacgttgacgatatagtcgccggcgaccacgccctgctggtcgtcgcggccgcacatgcggaacatcccggagagtccgcgctcggtgacctgcgggttggtggaaccgggggtgatggcgatgatcccggcctcgtcgtagacctcggatgcggggatggtcgaagaagagcagaaatggccgaccacggcgatggccttgtcctggtccaccaggcggttggccacggccacggcctgcttcggttcgcaggcgtcgtcggccttgaccagcttgatcttctcgccgttgatcccacccgccgcgttgatgtcttccgccgcctgggacgcgccgcgccagtattgctcgccgaaggaggcgttggcgccggtatgcggtccggccacgccgatcacgacgtcggccagcgcatgcgtggaaagacccatcacggatgaaaccgcgagagccaggatgccttttctgaacagcttcttggacatggggtgttgctcctgaggatgatgttggcgctcgtaactacgatgttgttgttgtgtttcgctcaacaggcagagcaagcggcgtgccattcgtttttttcctgagtggccgaccacaagaactttagccctcctttccgtttttatctttgttattggaaatcagtcatttaggcatttctccgaatccccttcggagagctacagcccaggcttcacaaggcctgaaccgttcctaggaataactctacaacgatattgaagcggttagaaactgcacgtcactggtgcgttccacgcactaattgaggtcctctttttcaatgaaagtgcaggacagagcggtttttaaaattaatatgaacatgaacttcccgggattcggtacttggcggaaaaagtcgattcgaatacgacatgaacatatccgttagcgacgccacgttcggcgcaaaaccctgtgacggattcgtcataagccagcgaatgctctatcgcgagacttgccggcagtaataagcgtcgcccggcactccggcaagcgagctttcctccctacgtcattccgtttattcatataacgcgttccgcccgctccacccgcgccaggaaacccgccatgctgaacaaacgccgcctgccgtcgatgaccgccctgcaatgcttcgaagcggtagcccggcacctgagcttcacccgcgccgccgaagagttgagcctgacccagagcgccatgagcaagcaggtcgcgcaactcgaggagcaactgcagcacgccctgttccgccgggtgcgcaagcgcttgcaactgaccccggccggcgagctgtacctggccgaggtacgacgcatcctgcaacaggtagagctgtccacccgcttcctgctttcctacggcggcgagaccgaagtgctgcgagtggcgaccccgccgaccttcggcgcgcgctggctgatcccgcaactgaacggctggcgccaccgccacccgaacatccacctcgacctgcgccaggaactggaaccggacgacctgcgccagggccattgcgacctggcgttcttcttcggccccggcaccctgccgggcgccgagtgcatccgcctgttcggcgaacaactggtggcggtctgcgcgccatccctgttgccggccggcggactggacgaaccgacccaactggcggagctggtgctgctgcagaacgccagccgcgcggaggcctggcacgactggttcgccagcctggagcgaaattgccagggttgctaccacggtccacgcttcgacaccttctacatgtgcatccgcgccgcccaggccggttgcggggtagccctgctaccgcgcttcctggtcgaggaggaactcgccgaaggcaagctggcgatcgcctggccgcacgccctgcccagccaggaggcctactacctggcctatcccgagcatgccgcggaagtccccaaggtgcgccatttcatcgagtggatggtagagcgcctggagcaggagcaaccctcagcgggcccccgccagacgcgccacggcccggtttgacgtttccgctgcgcggaaccatctttactctcactcggttcacctcggaacgtcccatgctcactggcgtcacggttcgaatccgcctgctggtcctggcgctgctaccgctgacgatgctcgtcacggtcatcgcgatggcgctggccaacgccagtcgactcgatgccagcttccaggaccttttcaacaaccggatgaagcccatcagccagctcaagatcgtcgccgacgccgttgcggtcagcgtggtcgacgccctgcacaagtaccgtgcgggggtcttcgatgaagagcgcctgcagcaggagttgagtggggcgctgtcgcgcatcgagaagtcgtgggccgactattccgcagaccaccggactgccgccgagaaggaaatcatcgagtcgctggtccccaccctggaacgggtcaagcggatgaccctggcatacggcgagcaggccagggccggaagcctgcgaaacgtcgaggccggcacgttcaatcgcgagatgtatggtgcgttcgatccgctgggaaccgcgctgtcgacgctgatcgacctgcagctcagtgaaggcgccaagctcaacgagcagatggagaaacgctacgactccatgcgcaccaccttcctgctcatcggcgccgcagccctggtcctcatcgtcgccgcggcctggttcatcagcctgtcgatcatgcgcccgctttccgatctgcgcggggtgatccgccgcgtgcaggactcctcgaatctcacgctccgcgccgatgcgcgcgggcgcgacgaagtgtccgatacggcgcgcgccttcaatatgatgctggaaagccagcaggcgctgcttcggcatctcgccgagacagccaggaagctcaccatcacctcggacgagatgagtgccatcagcaaccaggtcagccatgtcgccacgtcccagggcgaccagaccgacatggtcgccacggcggtacaccagatgagcatggcggtccaggacgtggcgcggaacgcccaggccgccgcagccagcgcggaatcggcgaacagcgaggcgcacaccggaaccggactcgtgcatgcgaacctcgacgccatccagggcctgtcggtcatggtcggagaggcgggagccgtcatcgacacgctacgcaacaagaccgaggaaatcagcaccgttctggaagtcatccagaacatcgcccagcaaaccaacctgctcgccctcaatgccgcgatagaagccgcacgggcgggcgaggccggacgcgggttcgcggtggtcgccgatgaagtgcgcagcctggccaccaatacgcacaaggccaccgaaaccatccgcgagatgatcgaagccctgcaggcaggcgccagcagcgcggtcagcgtgatgcagcagtcacgcgagcaggcccaggtcagcgtccagcgcgcccacgaggcgggaaaggcgctcggtctcatcgcccaggcggtcgaaggtatcgcccagagcaacgcgcagatatccacggcgacggaagaacagaccgccaccgcgagcgaggtcagccagaacatcgactcgctcaatgccagcatcggcgaagtcgccgagggcgcggtgaagacctccacctccagtgtcgagctggcgaagctggcaaacggactggagcagcagatccagcgcttcaccgtctagcaagcgcggcagggagcggcctcaccggccctgccgcacccgtttgtcaggacgccagcaggctgcggtcgaaaacgaaggcgccgcccggcttcggggtgaaatgcaggacgtgttgcgggcgccccatgggcggacgctggcgttcgccggtgtcctcgacccagccagcctccttcatccgctccaggcgcccgcgcaggctggaatgctggacttcctggccgatggcgcactcgaaggccttcagcgcctcggccacggtgaagcgcggcgccagcaggaacagcggcagggcgctgtacaccgacttgctcgccaggcgctcgcaggcctgctgtaccagttgggcgtggtcgaacggcagggcgaagcgctcgctgcgaacgtcgcgcagcggcacgaagtcgaggtcgtcgtcctccacccgggtgtccggaccgaccagcaccaggtagaacacgctcagcgaccagccgcgcgggtcgcgtaccgcgttgccgaccgtggccacctgctcgatgtaggccggctccagccgcgccttgtcgcgcagggcgcgcaccgccgcgtcgtcgaggctgtggtcggcgctgcggccgttgaccagcacgccgggcaaggcccactggccggcgaaaggcgcctgggcgcggcggatcagcaacagctccagtccgtgcccggggttcaggcgcaacgccacgatatccacgctggccaatacttccgctgaactcatcgtcactcctctcttcagcccgcctggcgttcgccgccatagcagtgcagttcgtccttcacttccggcaggcaccaggcctccggtaccgccagcccttcacgcaggcgctggcggatcatcgagctgtgcagcggcagccgctcctccgccaccagccggccgaagcgccagcacaattcggcggcgcgttcgaagcgcggcagctccgcctcgttgtcggcgccgatcagcagggcgatccgcggtgacgccaggccgctacgcgcggccagcgcttccagcaggtcgatgctgtagaccgccggacaatcaggcatcaatcctgcttcgatcggttcgcaatacacccgccgcggatcgatccgccgggccagccgcgccagccagcggcagcgcagctcgaaatcgcccatgcgcttgccgaaggcgtggcggtggctcggcaccagggcgacccgttcggcgcaaagcagcgcccggcggatcaccgactcatggccggggtgcggcgggtcgaacgccccaccgtagaccgcgagggcgaagtcgggggcgcgtccgccgctcatcccggcaggcagtcggcgaatccggtaacttatttcatcacgcatagaaaataccttccactgcgaaattttgtagtacaagtgcttgacgacttatttcacgtgatgaattatgtacccacattcagccccaacccgtcaagcggaggcttccatgaatcgtcccagcaagatcgccagcttcgatgtcgacgcccagaaaggcttcaccccgctgtgcccggacgaactgccggtgcccggcggcgacgccatcggcgccgccctcaaccaactggccagccgcgccgcgctgcgcctgggcagcaaggacgcgcacagcccgaaggctgcctgggtagtggaaagcgccgagcagatgctgcggccgctggcctatccggatgccgacctgacctgggtgaaccactgcgtaccgggtacgccgggtttcgagctgctcgacgaactgccgcggccgatcgactacgacttcttcgtctggaagggcgtggagccggacctgcatccctacggcgcctgctaccacgatctggcggaacgccgcagcaccggggtcatcgaatacctgaggcagaatggcgtgagccatgtgctggtgggtggcctggcgctggactactgcgtgaagaacaccgccctgcaactgcgccgcgccggtttcgaggtgctgctctacctgcccgcctgccgggccatcgccgaggacaccgcgcagcgggcctgcgacgagatgcgcgacgccggggtgatcctctgcgccgacctggaacgactggatagcgccctcgccggcgccgacaaggagaagtgaacatggccgaaagcgtctttgccgagcgcatcgtgcagaacctgctcgataccgatttctacaagctgaccatgatgcaggcggtgctgcacaactaccccaacgccgaagtggagtgggaattccgctgccgcaacgccgaggacctgcgtccgtacctggcggagatccgctaccagatcgagcgcctcgccgaagtcgaggtaaccgccgaccagctcgctttcctcgaacgcatcccgttcatgaagccggacttcatccgcttcctcagcctgttccgcttcaacctgcgctacgtgcacaccggcatcgaggatggccaactggcgatccgcctgcgcggcccatggctgcacgtgatcctcttcgaggtgccgctgctggccatcgtcagcgaggtgcgcaaccgttatcgctaccgcgaggtggtcctggaacaggtcggcgagcagctctatcgcaagctcgactggctctccgcccaggccagcagcgaagaactcgcggaattccaggtcgccgacttcggcacccgccggcgcttctcctaccgcacccaggaggaagtggtgcatatcctcaagcgcgacttccccgggcgcttcgtcggcaccagcaacgtgcacctggcccgcgagtacgatctcaagccgatcggcaccatggcccacgaatggctgatggcccatcagcaactcggcccgcggctggtcgacagccagcaagcggcgctggactgctgggtccgcgagtaccgcggacagctcggcatagccctgaccgactgcattaccatggatgccttcctcgacgacttcgacctgtacttcgccaagctcttcgacggcctgcgccacgattcgggcgacccgctggcctgggcggagaaagccatcgcccactaccgccgcctgggtatcgacccgctgagcaagaccctggtgttctccgacgggctggacatgcccaaggcgttgcagctgttccgcgcgctacgtggcaagatcaacgtcagcttcggcatcggcaccaacctgacctgcgacatcccgggggtcgagccgatgaacatcgtcctgaagatgacggcctgcaacggccatccggtggcgaagttatccgacgccccgggcaagacccaatgccgcgacgagaacttcgtcgcctacctccgccacgtcttcaacgtgccggcctaatcctttcgcacctaacgggagcccgaacatgcaacagatccaacgcgacatcgcccaagccctgcaggtccagccgccgttccagtcggaggccgacgtgcaggcgcagatcgcccggcgcatcgccttcatccagcagtgcctgaaggattccgggctgaagaccctggtgctggggatcagcggcggcgtcgactcgctcaccgccggcctgctggcccagcgcgccgtcgagcaactgcgcgagcagaccggcgaccaggcctaccgcttcatcgccgtgcgcctgccctaccaggtgcagcaggacgaggccgatgcccaggcctcgctggcgaccatccgcgccgacgaagagcagaccgtcaacatcggtccgtcggtgaaagccctggcggaacagctggaggccctggaaggactcgagccggcgaagagcgacttcgtcatcggcaatatcaaggcgcgcatccgcatggtcgcccagtacgccatcgccggcgcccgcggcggcctggtgatcggcaccgaccatgctgccgaggcggtcatggggttcttcaccaagttcggcgacggcgcctgcgacctggctccgctcagcggcctggccaagcatcaggtacgcgccctcgcccgcgccctcggcgctccggagaacctggtggagaagatccccaccgccgacctcgaggacctgcgccccggccatccggacgaggcttcccacggcgtcacctatgccgagatcgacgccttcctgcacggccagccgctgcgcgaggaagctgcgcgggtgatcgtcgacacctaccacaagacccagcacaagcgcgaactgccgaaggcgccctgagcctcccggtccgtgcggcaggcccgtcgtcgacgggcctttgtcgcgggcgggaatgtgcctgtcgcaaccaggtcttcaagtccgcgcggcggcgcgctagaaggaagctgaatccctgcgaaggccagccatgcgcacccgtctccccgccctgctcctcggtgtcctgctgtccggccaggcctgcggacacacatccccgctgctcgcgccggtacggcagatccacgccttcggcgacagctattcggacaacggcgaaagccagcgactgacccgcgagatgctcgccaagggcatcgccggcgcccaggcattgcccggcgaagtctactggcagggccgctggagcaacggcccgaccgccgtcgaggtgctcgcccgccagcttggtgcgcaactggccgaccatgcggtgggcggcgccaagagcggagcggacaactactacggctggatgagcgcctaccgccataccggcctcgccggccaggtcgacgcctacctcgccacgctggacggcaagccggtcgatggccaggcgctgcacttcatcttcgtctccgccaacgatttcttcgagcacgaggatttcgccggcgagcagcccctggaacaactggccggcagcagcgtggcgaacatccgcgccgcggtgcagcgtctcggagaggccggcgcacgacgcttcctggtggtcagttcgaccgacctgagcgtggtcccggcggtggtcgtcggcaaccgggtcgagcgtgcgcagcgctacctgcaagcggtcaacgccagcctgccgatccagctcgccgccctgcgcaagacccgcggcctggagctgagctggttcgaccatctcaccttcagccgccacttgcggcgcaacccggcacgctacggcctggtggagctggacgcgccctgccagccgacccagcccagcgtccgcccggcctgcgccaacccggaccagtactacttctgggacgagtggcatccgacccggcgcgtgcaccaactggccggcgaagcgatggcggcgcgctacgcgcgctgagcccggcgcgcgcccatgaaaaagcccggcagcggccgggctttttcatgcagcggatcgctcgcgcatcacttcagggtcagggtgcccttcatcagcgcggagtggcccgggaaggtgcagaagaacatgtactgctcgccttccttcagcttggagacgtcgaaggtcaccgagtccttctcgcccgagccgatcagcttggtgtgggcgatgacacggctgtcgtcgggcttcaggtaatccttgtccaggccggaagccatgccgtcggtgaccacgccctgcatgtcggcggcggtgctcagtacccagttgtggcccatgacgttcttcggcaggttgccggggtgggacaggttgacggtgaactgcttgcagctcttgtcgacggtgatggcattggtgttgaactgcatctggtcgttaccctggatgtccaccgagcactcggcagccagcagcggcgcactgagcagggacagcagggataccgcagcgagtttacgtagcatggagcagcctcctaggcaggttgggcgatgaatcctgaaagagcagactgcccgatcgggcaccgagttccactgattcaggtcaaacccgaaccggacgtggcggggcatcgagcgggatctgcccggcgtttactacggggaactcctgttttagcacagatgtgccgcttcgcgcctgcgacgcaacgtccggcaatgcttcgcacggcttggtcgaagcgctcccagccgctaccctgtgcgcctttttccacccccgacaggagtcgatcatgaccttgcgttccgtctgcgtattctgtggcgccagccccggcgcttccccggtctaccaggaagccgccgtggccctcggccggcacctggccgagcgcggcctgaccctggtctacggtggcggcgcggtcggtctgatgggcaccgtggcggacgccgcattggccgccggcggcgaagtgatcgggatcatcccgcagagcctgcaggaggccgagatcggccacaagggcctgacccgcctggaagtggtagacggcatgcacgcgcgcaaggcgcgcatggccgagctggccgacgccttcgtcgccctgcccggcgggctcggcaccctggaagagctgttcgaggtctggacctggggccaactgggctaccacgccaagccgctgggcctgctcgaagtgaacggtttctacgacccgctgctgaccttcctcgaccacctggtcgacgaacgcttcgtccgcgccgaacaccgcggcatgctgcagcgcggcgccagcccggcggcgctgctcgatgccctcgccgcctggacgccaagcgtggcgccaaagtgggtcgaccgcaccccgcagtgatccgctcctctctcaggacggcggcagcaggctcagcgggtcgagcggccggccgttctggcggatctcgaagtacagctgcacccggtcggcatccgaggaaccggcctcggcgatcttctggcccttgccgaccatctgcccctccttcaccagcaagcggctgttgtgcgcgtaggtgctggtgtacgaggtaccgtgctggatgatcaccaggttgccgtagccacgcatgttgttcaccgcgaacaccaccttgccggccagcgaggcctgcaccggctggcccagggtgccggcgatgcggatgcccttgttgagcttgtcggaactggagaagcggcggatcaccggccccttcatcggccactgccagccgcgcagggtcaccgacggcggcggaggcggcggcttgcgcgcacgggtggtagacgaagagcggctactggcgacgtaggtcgacttgcgcccgtcgaagcgcaccacctggccgaccttgaccgcgtagggcgggcggatgccgttggcgcgcgccaggtccttgtagttccagccgtgccgggtggcgatcgaatagagggtgtcgccgcgcttgacgcgatactcgccgcgcatgaccttcggcaccgacgcccccgggccgggagccttggagctgcacgcggataccgccagcaggacggcgatcaagagcaatctgaagaacacacggaatccttttcccgatgaaacccggccggctgcggcgacggttgcaggcccgcactataccttgttcgccggggtgcccgttggactcgccgatggcccgttttctccgcgcggcccgccacccggtccgcgcacaaacgccaacgccccgcaggacggggcgtcggtgccgagcgggaaacgtcaggcgccggcggactgctgcacgatcaccgtctgcgccggcatcggtgccgggaagtcggcgccgagggcgtccttgatcaccttgttggtatcgaaatagacctgccagtaatggtcgttgtggcaatacgggcgcaccgccagcaccggcccgaccaggttgaactcgaggatctccacgtccaccggcggctcgccgagcacgttgggaatcgccgcgacgcgctgcttgagcagggcgatggccgcctggtagtcggcggcaccggaaagctgcgccttcaactcgacccggcggaacgggttgtgggtgaagttctggatgttgtcgccgaatatcttgttgttgccgaccatggtcagcacgttgtccggagtgttgatcgccgtggtgaacaggccgatctccttgaccgtgccggtcactccgccggcgcagatgaagtcgccgaccttgaacggccgcaggacgatgatgaagccgccggccgccaggttcgccagcaatcccgaccaggccatgccaatggccaggccgaccgccgcgatcagcgccgccaggctggtggtctggatgccgaagaaaccgaggatgcccaccaccagcagcacgttcagggtcaccgtgatgaacgaacccacgtagcgcagcacggtgggatcgaccttttgccgctcgagggatttctgcaccatgccgacggcgaagccgatcagccagcggccgatcacccagaaggcgatggccgcgagaatcttgatgccgaaggcgaaggcgtactgggacaccgtcgcccagagcgcgttgatcttctcggtacctacgttgacgatcgtcgtgtcatccatatcgctcaccgtgcgcaaggaaggagtctggctccgtacgagaaccgcccctggcaccggaaaggcaggctccggcccttggcccgacaacgtccgtagcggattctggaaaagctagcacggcgccgcgaatttgccggagcaccgcttcgttgtccccaaacggcgtgggcgaggctgtggacaacctgggtgaaaaggtccgggagtcccgggcggcagggcctccgcggtaccgatcactttttgatcagccggctgtttcctgtagcggcagcaccgtcacccgcacctccgggtcatggctaccgccaccgaggatcaccccgcgcaacggcgacacatcggaaaaatcccgcccccaggccagggtgatgtgctccaggtcgggcaacaggtcgttggtcgggtcgaaatccacccagccgttctccgggcaatacagcgagacccaggcatgcgaggcgtcggcaccgatcagtcgcgcctgtccgggcggcgggcgggtcagcaggtagccgctgacgtagcgcgccgccagtccgcgcgcgcgcaggcaggcgagcatcaggtgggcgaagtcctggcagaccccgcgacggcgctccagcacttcgtccagcggcgtcgccacctgggtggcctgcgcatcgaaggcgaactcgcggaagatcttctccatcagtgccgccgccgccaccagcaacggccgtccgggcgggaagcagtcggcggcgaactcggcgaatcgccgctggatgcgcacatagggcgactcgacgcgatagcggcaggcttccagctcggcggcggacagcgcccgcccggaaaatgccagcccggcggcgacggtttcccatgccggcgacgcggtcagttgcgccggcgcatgggcgaacacttcgacctgcagtcgcgcgctgacccgcagcgcctcgtggggacgctcgaaggccagccggctcagcggattgccgaatgcgtcgtggccatcctcgcgccggctcggccccggctcgatcagcagtgcccgctcatgacaggcctgccaggcgcattcgcgtggccagagatgcgccagttgccgcgacagcgagaccggcgtcgcatagcggtaatgggtgtcgtgcagcacctggtagcgggcgccctggagcggaacggagcgaagcgcgggtgcggacatcaggtggataccgttctctggctgacatcgtcgacatgggcgaaatagcgcaagcctagccgatcggagacctgtccggcgcaggcggcgatgtcgcgcagcagtcgcgccagcccgacgagcacctcgtcgagtcctgccgcgccgaacagcgggctttccagggccgccagatcgaagctgcgcaggcgttcgcccagggtcctgagttcccgctcgcgtggcgcgccgaactcctcgtgcaggcgctccagcgaacgctccagggcctgcaactggaagcgcagcgagtgcgggttctgctcgtgcaacaggagcaggtcgagcaccgggaccagctgcggcgacgccaggtagcgcgagcggtaggtgatgccgctgttacccagctccagcagccactccagcgcgccggcgtcccaggcgctaccgccgtcgaggaaggcggcgatgctctcggcgaagaagcgcacgcgctcgatgcgccggccgatcatcaggaaacgccagccgtcgtcgcgggtcatgtcgtcgagggcgaaaccggacaacgcggccagggacatcactagccggttgaggaagtccagcgcttcgccgaggtcggtgcgtgccggatcgagcgcctgcatgtcgcgttgcagctccagcaaggccagccagttctccccggacaagcgcccgcgcacctgcgccgccgcccagtgcaggcgccgcaggttggcgcacaggctcgccggccagtgctcgtcgagcaacgcccgcaacaggcacctttccaacggctcgccatccccgggcagcaggccgatgccgccggccagggccagggcgctgcgcagcgcctcttcgtcgccatcggcatccacgtagcgcgacagcaccacccgcagcaggcgcgcgtggtcgtcgcaacgctcggcatagcggccgtaccagaacaggttttccaccacccgcgacggcaggtagggatcctcgcggaccaggtcgcgcacgccgagccggcgcggccgccacggctcgccgccgaccgcacgctcggccagtacccaggtgtccttgctcgcgccgccgcgttgcatcgacaccacctcggcatccgccgccgaggctacgcgggtcagaccgccgggcatcacccagtagcgtccgtcggcggcggcgacggcgaacacgcgcatgccgatggcccgtgactgcaggccgacgccggcctcgccgtcgcgccagaccggcgcctgggacaactgcgccaggcgttgcgccacgtaggcctgcgggcgctcgcgcaagcgctcgccgagggatgccaggccggcactgtcgagggcgtggccgaacagaggttcgcagcgctggccgggaaaggccggcttgatcaccaggtcgggcagtgccgcgagtatcgcctcgagggcttgcggctcgccgcaccagcgggtgtcgagcgagggcagcgccagttcctcgccaagcaggcggcgacaagcctgcggcaggaagccgagcaggccgggcgactccagcactccgctgcccagtgcgttggccaccagcacgcgtccctggcgtaccgcctcgagcaggccgggaatgcccagcgccgagtcggtacgtaattccagtgggtcgcagaaatcgtcatcgaggcgccgcaataccgcgtgcacccgtttcaggccgccgagggtcttgagatagagggtggcgtcgcgcaccgtcaggtcgtgcccctcgaccagcggaaaaccgagctggcgcgccaggtagagatgctcgaagtaggtttcgttgaaacgtccgggagtcagcagcaccaccagcggcgtctcgccgtcgccggcggcctggctggcgagggtctcctgcagggtgcggaaatacccggcgagatgctgcacgcgcaggtcgcgatagagttccggcaaggcccgcgagacgatctgccggttctccagcgcatagcccgcgccggacggagcctgggtgcggtcggcaaggacctgccagcgtccgtcggcatcgcgcgccaggtccacggcatagctgtgcaggaaaatcccgccgggcggccggatgccgagcgccggccagaggaagttcggatggccgaagaccagttcgctgggcagcagcccttcggcgagcagacgctggtcgccgtacaggtcggccagcagcgcattgagcagccgagcacgctgcgccacaccagcggcgatcggctgccactcggcggcggacagcaggttcggcagaaggtccagcgcccaggggcggtcggtgcccttgggatcggcgtaaacgttgtaggtgacgccgttctcctggatctgccgttccaccagggcctggcgctggcgcaattgctcagggctgctgcgctccagttggcggaacagccgctgccaatggggacgcacgccgccctggcgatcgagcaactcgtggtaggccgtatcggtgaacggatagtgggcaagcagctcgggcatcgaaggctcgcggggctggggttgcggtcactgtagcggagtcggcggcgcgacgccggagcgaagcgacgaggcgttgccgggtccgccacgacggttcttcgtgaagaccgggatgccccggaagcgcaagacttgtgccagcgccgtcaggcccgggcggccaggaggtcgtgccgcggcaatgcactgcgacggtgcgcgaccgcaggcaaggttgcagccgcgcacgctttgcgggcggcagggccgccccggcgatcagcgcgggatgttcggctggcgcgacttcttcttgcccttgacgaaggccgtcgccttgttctgctgacccttgctccacggcttgccaccgtcgctggcgcgtggcggcaggccggtatgctgggtcagcagcttgccggccttcttgctgccggccggcgtcgagttcttccgccgggcgctctggtattcgccggtatccggctggtaggtcgggaccaggtggtgcttgccattgccgatcaggtcggcgcgccccatccgctccagcgcctcgcgcagcagcggccagcctttcgggtcgtggtagcgcaggaaggccttgtgcaggcgccgctgctggtcgctcttgacgatggtcacgccatcgctcttgtaggtgaccttgcgcagcgggttcttgcccgagtgatacatagcggtggcagtggccatcggcgaaggatagaacgcctggacctggtcggcgcggaagccgttgcgcttgagccacagggccaggttcatcatgtcttcgtcggtggtcccgggatgggcggcgatgaagtacgggatcaggtactgctccttgccggcttccttcgagaacttctcgaacatctgcttgaagcggtcgtaggtgccgatccccggcttcatcatcttgtccagcggaccgcgctcggtgtgctccggggcgatcttcaggtagccgccgacgtggtgggtcaccagttccttgacgtactcgggcgactcgacggcgaggtcgtagcgcaggccggaggcgatcaggatcttcttcacccccggcagcgcccgggccttgcggtacagctcgatcagcgagctgtggtcggtatcgaggttctcgcagatgccggggaacacgcaggatggcttgcggcagtgccgctcgatgtccgggctcttgcaggcgatgcggtacatgttcgccgtcggtccgccaaggtcggagaccacgccggtgaagccgggcaccttgtcgcgcatctcctcgatctcgcggatgatcgagtcgtgcgagcggttctggatgatccgtccctcatgctcggtgatcgagcagaaggtgcagccgccgaagcagccacgcatgatgttcaccgagaagcggatcatctcgtaggcgggaatcttcgccttgccgtaggccgggtgcggcacgcgggcatagggcatgccgaacacgtagtccatttcctcggtgctcatcggaatgggcggcgggttgaaccagacatccacttcgccgtgcttctgcaccagggcacgggcgttgcccgggttggtctccaggtgcagcacgcggttggcgtgggcatagagcaccgggtcgttgcgcaccttctcgaaagacggcaggcggatcacggtcttctcccgggtcagcctggggttcgccagcaactgcacgaccttggcttcctgcgggtcctcctgcgcgcccttttcctgctcgatggcgcaggcggcggtgtcctgggtgttcacgtagggattgatgatcttgtcgatcttgcccggccggtcgatccgcgtggaatcgatctcgaaccagccctccggggtgtcgcgacggacgaaggcggtgccgcgcacgtcggtgatcgcgctcaccagttcgccctgggccaggcgctgggcgatttccaccaccgcacgctcggcgttgccgtagagcaggatgtcggccgtggcgtccatcaggatcgagcggcggaccttgtcctgccagtagtcgtaatgggcgatgcgccgcaacgaggcctcgatcccgccgaggatcaccggcacatggctgtaggcctccttgcagcgctggctatagaccaggctggcgcggtccgggcgcttgccggccaggccgccgggggtgtaagcgtcgtcggaacggaccttcttgtccgcggtatagcggttgatcatcgagtccatgttgccggccgccacgccgaagaacaggttcggctcgccgagcttcatgaagtcgtccttcgactgccagtccggctgggcgatgatgccgacgcggaacccctgggcctccagcaggcggccgatgatggccatgccgaaggacgggtggtcgacgtaggcatcgccggtgacgatgatgatgtcgcaggagtcccagccgagctgatccatctcttccctactcataggcaggaagggcgccggaccgaaacactcggcccagtacttgggatagtcgaacagcggcttggcggcttgcatcacgggcaccagggggtatctctaggaatggggggtcgcgaaaacgcggggcgcggaatatagcacaaaaaatgagcaattccgacgttttcactgggtattgcctgtcgtcggccggcttcgaaaaaatgccatcatttagccatcttgtttctatactccattcatcgtcatctcacccggcctctaaggcaggcccccgggagagtcatcgtgcgccatcctcttgccctgctcgcggtcatcttcctgctactggccagcgccgtttcgcgcgccgcgccggagtttccggcgcctccggccagcggcgcctggttgaacggctcgctggacctgctcgaagaccccgatggcaacctggcggtggaggacctcgaacaagcggagcaggccggccgcttcgtcgccgccgccggccgcaccagcgtcggcctcagccgcagcgcctggtggctgcgcctcgacctgccgagacgcgaggcggtatccggcggctggtggctggaagtcgccagcgccagcctgcacgacctgcgcctgtacctccccgacgagcgcggcgggttccgtgaacatcgcagcggcgaagcggtgcccttcgccgagggccgcgaccacgcctatcgtcatccgctgttccggatccctcccggcgatgggccgttgcgcgtctacctgcgcagctacgatcccggcggcaacgcctttccgctgaggctctggagccacgacgaactgctggaataccgcagccagggcaacctgctgttcggcatggcctacgggctgatcctcgccctgctgctgtacaacctgttcctcttcaccagcctgcgcgatcgcgcctatttctggtacgtgctgaccgctgccagcgcgctggtgctgaccctgagcatcagcggccatggtttcgagtatttctggcccgagcgggcggtgccctggtggcttgaccgcctggcgctgctggcgatctggggcatctgcgtgatccgcttcagccagaacctgctgcaaagccggcagcacgcacgctgggcccatcacctgctgaacgcctgttgcctgctgttccttgcctgcctggcgttcaacgccgccggctggcgctggcaggcggccggcgtgctggcgctgaccctgctggccaacctgccgatcgccatcggcctggcagtgcagcgctggcgccagggttcggccacggcgcgcctgtacctggtcggcttcggcctggtgctcggcagcgtcagccttggcgtgatgcgcgccaccgcgctggtccagccgacctcggccaacgccatggtcttcccgctggcgctgaccctggaggccctgctgttctccctggcgctcgcctcgcgcatccaggatctgaagcaggaaagggccctggccctggaccaggccgaccaggaaaagaacgcgcgcctggccctgctgcacagcgcccagcgcgacctggcacgcgccgtggaagtccgtaccaacgagttgagcgaggccaatcgccagttgcagatgcgcgaagcgcaactgcagtacgccgcccatcacgacccgctgaccgggcttggcaaccgcaggcacctgatggagttcgccgaaagcgccctggacgacgcgcgccgccacggcaacagcatggcgctgctgctgatcgacctggatcacttcaagccgatcaacgatacccatggccacgatgccggcgacttcgtcctgcagaacgtggcccagcggctgcgccattgcgtgcgcaccgaggattgcgtggcgcgcctcggcggcgacgaattcgccgtgctggtcggcgggtcgaatgccgagcagcatgcccgcgacatcgccgaacgcctgctgcgagaactggcgaaaccggtggagttcgccaagcagtggctggtgatcacaccgagcatcggcgtcgccctgtttcccggcgacgccctgcagttcggcaaactctacaaggccgccgaccaggcgctgtaccgggtcaagggcgccgggcgcgccggctatgcgatggctgccgacgatgaacgcgagaccgcgccggcgctcccctggccgaccgccctggcaccggagcgtatctcctgaatcagtggctgtagcgtcgcggaacccgagccgtgaccttgctcagaagctcgtagccaagggtgccgcaggcacgggcgacctcgtccaccgacaacccggcgccccacaactccaccgggtcgccaacgcgagcctccggcaggtcggagaggtcgaccgccagcatgtccatcgagacccgcccggccagggtcgcgcggcgtcccccgaccagtaccggagttccggctggcgcggtacgcggatagccgtcggcgtagccgcaactgaccgtgccgatccgcgccggccgctcggcgatccaggtggcgccgtagccgacgctctcgcccacggccacctcgcgcagtgaaatcaactgcgcgcccaggctcatggccggcctcaggcccagttcggcggcgctcaggtcggccagcggggtcgacccgtagagcatgattcccggccgcagccagtccatgtgggcggccgggatagtcagcaccgccgccgaattggccaggctgcgctggtcgaaatccaggtcgagcaggccgaggaaactctccagctgctgctcggtgagcggatggttgcgttcgtcggcgcaggcgaaatggctgatcaggttcagctcgcgcacaccaggatggttgcgcaggcgcgcatgccaggcgcgcagcgcggcaggatcgaagcccaggcggtgcatgccggagtcgagcttgagccagacgttgagtggaatatccaggccggcggcgaggaacgcctcgccctgttccgcgccctggatcaccaggtccaggcgcaattgcccggcgagggcgtattcgctcgcctcgaagcagccttccagcaacaggatgcgcgcgctggcgtgcaaggcgcggacttccgcggcctcctccaggcaggccacggcgaagccatcggcatcgtcgtgcaacgcggtaaccacttcgcgcgcaccgtggccataggcgttcgccttgaccaccgcgaacgcctggcgctgcggcgcgcagcgcttggccagggcatagttgtggcgaatggcggaaaggtcgacggtggcaacgaggggacgcatggcatcgggtcctgcaactgaaacgggtgcctatggtaaggcgcccgccgggcaagacccaagccgggtcattcgtcctcgaagttgtacatgccggcggcaaggttctcgaagcgcgtgtatttgccgatgaaggccaggcgcaccgtaccgatcggaccgttacgctgcttgccgatgatgatttcggcgacgcccttgaactcggtctccgggtggtacacctcgtcgcggtagacgaacatgatcacgtcggcgtcctgctcgatcgccccggattcgcgcaagtcggagttcaccgggcgcttgttgggtcgctgctccagggagcggttgagctgcgacagggcaatcaccgggcagttgaattccttcgccagggccttcagcgagcgggaaatctcggaaatctcgttggtccggttgtcgccgctggagccgggtatctgcatcagttgcaggtagtcgatcatgatcagcgccaggtcgccgtgctcgcgcaccaggcgacgggtccgcgcgcgcatttccgagggactgatgccagcggtatcgtcgatgaacagcttcttgtcgttgagcaggttgatcgccgaagtcaggcgcggccagtcctcgtcgtcgagcttgccggaacgcaccttggtctggtcgatacgcccgagcgacgagagcatacgcatcacgatcgagtcggagggcatctccagggagtacaccaacacggccttgtcggtgcgcatcaccgcgttctcgaccaggttcatggcgaaggtggtcttacccatcgacggacgcccggcgacgatgatcaggtcggccggctgcaggccgctggtcttctcgtcgaggtcggtgaaaccggtggacaccccggtcagcgcctcggtggtgttgaacaggtagtcgatgcggtcgatggtcttgaccaggatatcgctgatccctaccggcccgccggtcttcggtcgcgcttcggcgatctcgaagatcttccgctcggcctcgtcgaggatctcgttggcgccgcgcccttccgggtggaaggcgctgtcggcgatctcgttgctgatgccgatcagttggcgcagggtggcgcgctcgcggatgatctgcgcgtaggccttgatgttggcgaccgagggaatgttcttcgccagttcgccgagataggccaggccgccgacctgggccagttgtccttccttctccaactgctcggagagggtcaccacgtcgatcggctggttggcctcggccagcttgtagatggcgcggaagatcaggcgatggtcatggcggtagaaatcgccgtcggacaccgaatccgacacacgctcccaggcgttgttgtccagcatcaggccacccagcactgcctgctcggcctcgatcgagtgcggcggcaccttcagggctgtggtttccaggtcgtattgctcggggctggtgatctcgttcatagactcgacgcaagaaaaaggaacagcggaaaaaacaacgggcacggtgccgttgccggtaccgtgcccgatgttagcggactgccgcggacacgcatatgcccgcccagccctaccgatcggatcgcttactcagcgacgatgatcagcttcagagtggtttccacgtcggtgtgcaggtgcacggcgacgtcgaactcaccggtgttgcgcagcgcgccgttgggcaggcgaacttcggctttttccagcgggtaaccggcagcggaaacggcttcggcgatgtcgcgggtgccgatcgagccgaacagcttgccttcgtcgccagcgtgggcgccgagggttaccaccagctcggagagctgggcagcacgggcttcggcagcggccttcttctcggcggcagccttttccagctcggcgcggcgtgcttcgaacgcagcgacgttctcggcggtggcgacggtggccttgccctgcggcagcaggaagttacgggcgtaaccgcccttgatgttcaccttgtcgcccaggttgcccaggttggcgactttttccagcaggatgacttccatttgagtcttacctcttaacttttaaccttcaccgttcgtggaaccctggcgccgggccaggcgtccacgaaaatcaaacagactgtcgacaaccgccaaaagacagatcaggttccccagcagcaatacagccaggtacaggcccaccagccaaccacccgcgaggcgcttcagggcgatcaggccatgcccgagcgccacgccggcgatgatcagcggcacgctgcacaacggaccgagcaccgcggcctgcacttccagcgccgggaccacgacggcccccagcagcaggatcacggcaaccgccggcgccagccgcaaactccggaattcgcggccgaagccgcccgggttgtacagcgaagcctgccagtaccgcgcgagcatcaggcagagcaggcaggtcacctgcagcgaggaagccatgaccccggtcagggtcggcaccagcgccacctgcaacttgtccagctcttcgcccgacagctgggactccccgcgaagctgggtcaggaccttggtgacttccgtcgccagggcgccgatcagctcgctggaggtatgccccagcaccagcgcgaataccacgccaactgcaacactgcccagcagcacatggctccaggacgtgctggcgcgcaggatctgcgccagcgtcagggtaccgagcaggaccagaaggatgctcggatcgcccaggtaccaccagaacatcgccggtagcaccgcccaggccaggacgccgaaggcgtcgccgaatccgcgccgcagcagcaccaggctaccggcggcggcactcagccagaacaacagtggaacaaccgcggagcctgccacggcgagcgtggcctgcatgcggccgcgcatggtgaactcagccagtgcgcgcatgcgatctatcccttaccagcgttcgactgcccgatctcaacggccgtggctgtcggtgtaaggaagcagggccaggtagcgggcgcgcttgatagcggtcgccagctgacgctggtacttggccttggtgccggtgatacggctcggaacgatcttgccggtttcggaaacgtaggccttcagggtgttgagatccttgtaatcgatctctttcacgccttcggcggtgaagcggcagaacttacgacgacggaagaaacgtgccatgtgattggctcctcaatactggtccggaattactcgtcagcgttatcgctatcgctgttgtcgtcgccatcggcgccttcagcgttatcgttcggacgctcacgacgctcgcgacgctcgttgcggctttcttcagccttgagcatctcggactgctcggtgacagcttcgtcgcgacgcatgaccaggttacggatcacggcatcgttgtaacggaagttgtcttccagctcagccagggccttggcgctgcactcgacgttcatcagaacgtagtgggccttgtgcacgttgttgatggcgtaggccagctgacgacggccccagtcttccagacggtggatcttgccgccgtcttcttcgatggccttggtgtaacgctcgaccatgccaccgacttgttcgctctggtccgggtgaaccaggaacacgatttcgtaatgacgcataaatgctccttacgggttgcagcctgccgcagaacggtcaggcaaggagtgaatgttttcttggcttgcctggtggagaggcgaacgaacgcctgcccgcgcggcaaggggcgacattctagagaagggcaaccggcgaagcaaggaagattggcgaatatttgtacagcggatggaatggcgcggggccgcgccgcggcggccccgcacgcgctcactccagcggggtgcgctggcggaggatctcgaacaggcagacgccggtggcgaccgagacgttcaggctgctgacgctgccggccatcggcaacctggcgaggaagtcgcagtgctcgcgggtcagccggcgcatgcccttgccttccgcgcccatcaccagcacggtcggccccttgaggtcgagctggtagagggtcttgtccgcctcgccagcggtgccgaccacccacaggccgcgctgctggagcttttccagggtgcgcgcgaggttggtcaccgccaccagcgggatcacctcggcggcgccgcaagcgaccttgcgcacggtggcgttgagggtcgcggacttgtccttgggcacgatcaccgcctgcacccccgccgcatcggcggtacgcaggcaggcgccgaggttgtgcggatcggtgacgccatccagggccagcagcagcggcacgccctcgctccgctcgagcagttcctcgagcatgttttcgccccagacctggctggggctgacttccgcgaccacgccctggtggacgccttccgcccactcgtcgagttcgcgccgatcgcgctgccctaccggaatacggaacccggcggccagctcggtgagcacctggacccgcggatcatgccgcccctcggccagccacaactgcttgacccgcttcgggtgatgacgcaacaacgcttccacggcatgcacgccgtagaccttttcccactgactcatgacttggccttacgtttgcgcgccccggtggcggccggagcgttgtcggccttcggcttggaaggccccttgcgatgcttggtcggcttgcccggcttggcggcagcggcgggcttgccgtccttggccttgcccttcgcgctcttgcccgcaggaacgaccttgcccttcttcccgcccttgtccttgccgccgacacgcgcctcggcgagcagcgcctgcttcacctcgcgactcttgcgcacgtcggtgttgccgagcatctccgcggcctgcgccagcagctccggcgcgaccggcagcagcgcctgcaccttgccggccttgcgccgcggcaccaccgcggcgtcgggactggccagcgccggctccaggtcgacctcgggcacggatgcgcccttgcgccccttcggcgccttgccggcgttcgtcgacttgtcgccgttgcgcttcttgcgtccgatcggcgcgctcagcacgtttccggccagctcgaaatcgatcttccgctcgtccaggtcgacccgcgccactaccacttccgtggtgtcgccgagacggaagctgcgcccggtgcgttcgccgctgaggcgatggtgcacggcgtcgaaatgatagtaatcgccgggcagcgcggtcacatggaccaggccttcgacgaagatgtcggtcagctcgacgaacagaccgaaaccggtgaccgcagtgattacgccagggaaggtctcgccgacccgctcgcgcatgtattcgcacttcagccagttggtcacgtcgcgggtggcctcgtcggcacgccgctcggtcatcgagcactgctcgcccaactggtccaggcgcaattcgtcgtacggatagatacgcgccttgggcatgctcgccgcgccggcccgctgcacgtgcggagtctccgccttggagcggatcacactgcggatcgcacgatgcaccagcaggtccgggtagcgccggatcggcgaggtgaagtgggtgtaggcgtcgtagttgaggccgaagtggccattgttgtccgggctgtacaccgcctggctgagcgaacgcagcatgaccgtctggatcaggcggaagtcggcgcggtcgtggatcttctccagcaactcctggtagtcgcccggggtcggcgcggccttgccgcggccgaggctcaaccccagctcgccgaggaactggcgcaggttgttgagtttctcctgcggcgggccgtcatgcacccggtacaacgccgggatggcgtgcttctgcaggaagcgtgcggtcgccacgttggcgcagagcatgcactcttcgatcaggcggtgcgcatcgttgcgctgggtcgggcggatttccgagatcttccggtcggcgccgaagacgatgcgggtttcctgggtctcgaaatcgatcgcgccgcggacatggcggccggccagcagcgctttatacaacgcatacagctgctgcaggtgcggcaccacgccgggcaactgctggcgcaggttctcggcctcgacgctgtcggggtgctcgagcaactggctgaccttggtgtaggtcaggcgggcatgggagtggatcaccgcttcgtagaactggtagccggtcagcttgccagccttggacagggtcatctcgcagaccatggccagccggtcgaccagcggattcagcgagcagagaccattggacagcacctccggcagcatcgggatcacccgctcggggaaatacaccgagttgccgcgcctggccgcctcttcgtccagcgccgaaccgaccttcacgtagtgcgagacatcggcgatcgccacgaacaggcgccagccgccgccgcgcttggcctcggcgtacaccgcgtcgtcgaagtcgcgggcatcctcgccgtcgatggtgacgaagggcacctggcgcaggtcgatacgcttttccttgtccttctccgccacttccggcttgagcttggccgcttccttctccaccgcggccggccagacgtgggggatatcgtagctgcgcagggcgacttcgatctccatccccggcgccatgtagtcaccgagcacctcgacgatctcgccctgggcctggcggtggatgctcggccattgctcgatgcgcacctggacgaactggttgtgcctggccttgccggccttgcccggcgggatcaggacttcctgctggatcttcgggttgtccgcgaccaccacgccgatgccgctttcctcgaagtagcggccgaccacgatctcgtgggcccgctcaatcacctcgaccagctggccttcgcggcgtccgcgccggtcatggccggacacccgggccagggcgcggtcgccgtcgaacaccagccgcatctgggtgggactgaggaacaggtcgtcgctgccatcgtcggggatcaggaagccgaagccgtcgcggtgcccgctgatgcggccgcggatcaggtccagcttgtccaccggcgcataggcgccacgacgcgtatagataagctgcccgtcgcgctccatggcgcgcaggcgacgacgcaaggcctcttccggctcctcgccggcgagcccgaactcgtcgagcaactgggagcgagtcgccggagcgccccgctcggataggtgagccaggatcagttcccggctggggatggggttttcgtacttttccgcttcgcgagcggcctcgggatcgaggttttgccaatcggccattagaggtaggtcaccttttcttctttagcgtttgctgccattgctctattgaagcgcgaaaacgcttcgtcggtcagcttcggcaacagaataatttttatcgcatcaggggtttacaagcagaatacgtactcgtatagttcgcgcccacaacgttgctgagacgttgtaacacggaaacgatgagcgatcatcgactccagtgcccaggtggcggaattggtagacgcactaggttcaggtcctagcggtggcaacaccgtggaagttcgagtcttctcctgggcaccatatttcagacaaagccggtcattagaccgtttttgtttcagcagttcagccactaccaggcattgaaactgcgacaaggtttgcaacacccaagtcgatgagcgatcatcgcacaatgctgaaaagcatgcccaggtggcggaattggtagacgcactaggttcaggtcctagcggtggcaacaccgtggaagttcgagtcttctcctgggcaccatcttcaagacaaacagccgagcatcgctcggctttttgttgtccgcgattttcccttcgagccacgccacctccccccgctcgccgcggcgccgaccccggaaatgaaaacgggccgcatgcgcagcccgttccgtcatcgccccgctatccgcctcaggcgaatggatggcgcaggatgatggtctcgttgcggtccggaccggtggagatgatatcgatcggcgcacccaccagctcttccacgcgcttgatgtaggcgcgggcgttggccggcaactcttccagggtcttcgcacccacggtcgactcgctccagccgggcatttcctcgtagaccggctgcaggccgatgtagctgtcggcatcggtcggcgcttccagcacatcgccatcggcattcttgtagccgacgcacaggcgcaccacatccaggccatcgagcacgtcgagcttggtcaggcacaggccggagatgctgttgatctcgatggcgcggcgcaggatcacggcatcgaaccagccgcagcgacgagcgcgaccggtggtggcgccgaactcgtggccgcgcttggccaggtaggcgccgacgtcgtcgaacagctcggtcgggaacggaccggagccgacgcgagtggtataggccttggtgatacccagtacgtagtccaggtacagcgggccgaagccggaaccggtggcggtaccgccagcggtggtgttggaactggtcacgtagggataggtgccatggtcgatgtccagcagcgatccctgggcgccttcgaacatgatgtccttgccgtgcttgcgcaggtcgtgcagggtcgcagcgacatcggccatcatcggcttgagcagctcggcatactccatcgcctcgtccagagtcttctggaagtcgatggccggctccttgtagtagtgctgcaggacgaagttatggtagtccagcagctcgcccagcttggcggcgaagcgctcgcggtggaacaggtcgccaacgcgcaggccgcgacgtgccaccttgtcctcgtatgccgggccgataccgcgaccggtggtgccgatcttggcttcgccgcgggccttctcgcgcgcctggtcgagggcgacgtgataggacaggatcagcggacaggaaggactgatgcgcaggcgctcgcgcaccggcacgcccttctcttccagcttggtgatttcgcgcagcagcgcatccggcgccagcaccacgccattgccgatcaggcactgcacgccttcgcgcaggatgcccgatggaatcaggtgcaggacggttttctcgccatcgatcaccagggtgtggccagcgttgtgaccaccctggtagcgaactacggcagccgcctgctcggtgagcaggtcgacgatcttgcccttgccctcatcaccccattgggtgcccaggactacgacattcttacccataacacttgtccccatcgtggaagttcgatgccggccgcggccggcggaatctcaggacgccagcggcgccacctgccaattgccatcgcgcagcgccagctgccggtcgcagcccgcctcgcgcgcagaagccgcatcctgcccgggcagagcctggacgacacgctgcccgtcgcggcgcagtcgttgcaccgcctgccagagcccggccccttcggccggcgcccagatacccgatacagcctggtccaaccgggactggccgagagtgaccaggcttttcagatcggtggagaaaccggtggccgggcgggcgcgcccgaaatcggcaccgatatcatcatagcgaccgccctgggcgatggactggccaacgccgggcacgaaggccgcaaacaccacgccggtgtgatagtgatagccacgcagctcgccgaggtcgaaatacagcggcaagccggggaaacgtccagccagcgaatcggcgatctcgatcagctcgttcagcgccacctggacatcggccggcgccgccgccagacgggcacggccctgctccagcgcatcgcggccgccgcatagctcggccagcgcacgcaacatgccgcgcagctcggcaggcaggtctgcagtcagcgcctcgacctcgtccactgccttgcgctgcaaggcatcgaacaactgctgctcgacttcgccggacagccctgccgcgcgcgccaggccgcggtagataccgacatggccgagatccatgtgcacgtccggcacttccgccatctcgagcatttccagcatcaggctgatcacctcgacatcgctggcagggctcggatcgccgtacagctcggcgcccagctggatcggactacgcgaagtggacagcgcgcgcggctgcgcatgcagcacgctgccggcatagcataggcggctcggtccctcgcggcgcaggctgtgcgcatccatccgcgccacttgcggcgtaatgtcggcacggaaacccatgagccggccggacgccgggtcggtcaccttgaaggtgcgcaggtcaagatcctgtcccgcgccggtgagcagcgactccaggtattcgatatgcggggtcacgacgaactcgtaaccccagcggtggaacagatccagcacctgacggcgggctgcttcgatgcgcgccgcctccgggggcagcacctcttcgatcccatctggcagcagccagcggtctaccgttgccatttcgcctctcccctttcagccgggcggcacatcatcagtgaatccagtaaagaagcagggtgccgagcagcatgctgcccagccccacgagacgcaggtgacggtcgctcagccggccgacgccggtgaccgcctcgcgccattgtcgcggacacaggaacggcaggatgccttccagcaccagcacgagacaaaaagcgatgccgaattcctgccacatgattctcgcggacgcaaaaaagccgggatttcccggctggctcatcataacacgatttctccggcgggcgctgccgcccgccggagaaccgagtattacttgttggccttgttcagatagcggaagaactcgctgctcggatcgagcaccagtacgtcgcgcttctcggcgaagctttcgcgatacgccttcaggctacggtagaaggaatagaactccggatcctggttgtaggccttggcatagatcgcggcagccttggagtcgccgtcaccgcgggtctcttccgactcgcggtaggcttcggcaacgattacccggcgctggcgatcggcgtcggcacgaatgccttcggccagttcgcgacccttggcgcggtgctcgcgggcctcgcgctcacgctcggtgctcatccgctcgaagacgctgcggttgacttccttcggcaggtcgatggccttgacccgcacgtcgatcacctcgatacccagttccttctgcgccatgcggttcagcgaagcggtgatgtcgcccatcagcgcgtcgcgctcgcccgataccacttcatgcagggtacgcttgccgaactggtcgcgcagacccgcttcgagacgccgcgacaggcgttcgtcggcgatctgcttgaggcccgaggtagcggtgtagaagcgctcggcatccgccacccgccacttggcataggcatccaccatcaccgctttcttttccagggtcaggaagcgctgggtcggggcatccagggtcagcaggcgagcgtcgaacttgcgcacctggttgacgtacgggatcttgaagtgcaggcccggcttgacgtcggactcgaccacccggccgaagcgcaacatgaccgcgcgctcggtctgctggactacgtagacgctgttccacaggacgatggcggcgacgacaccgacgatcagagcgatcaaagacttgttgcccatcagcggctctccctcgtacgcgcgtcttgctggcgcagatcgttgacgatccgcgaccccaggtcggaagcgctggcgctgccaccaccggcggaagcaccggcccccgtagcgggcgcggcgttacgaccatcgatcatcttgtccagcggcaggtagagcaggttgttctgcccctgctgaccggtcaccagcaccttgctggtctggctgaagacttcctgcatggtgtccaggtacagacgctcgcgcgtcacttccggagccttgcgatattccaccagcagcttggagaagcgatccgcctcgccctgggcgcgcgaaatcacctcgtcgcggtaaccgttggcttcttcgatgatgcgctgggcctggccacgtgcctccggcaccacgccgttggcataggcttcggcctggttcttctcgcgctgctcgtcctcgcgggcccggatcacgtcgtcgaacgcttcctgcacctcacgcggtgcctgggcgctctggatgttcacctgggtcacggtgataccggtcctgtaggtatccaggaagcgttgcaggcgctcgcgcacctcggtcgccatctgctcgcggccttcggtgaggatccggtccatggtggtggagccggcgacatgccgcagcgcgctctcggtcgcctgctgcaggctgacctcgggctggtcgacgttgagcacgaagtcctgcaggttgctgatcttgtactgcacggtcagcggcacttcgacgatgttctcgtcctcggtgagcatctgcccctgcttgctgtacgcacgctcgcgggtgacgttctcctggaagcgcttgtcgatcggcgggaagtagaagttcaggccgggaccgaccgtctcgtaatacttgccgaagcgcaggatgaccgcctgctcctgctcgtccaccacatagatggcgttgtacagccagagcacggcgaggatcgccaggccgatgccgaacaggcccaggccaccgcccttgccgccggaaccggagccggaaccgttgccactgcgtttttttccaccgaacagcccgttcaggctgtcctgaagcttgcggaaagcctcatccaggtcgggcggccccttgcggtcaccaccgccgccaccaccaccgcggcggcctccccacgggtctcgatcgttgttgttcgagttgtcacccggctcgttccaagccatagcgctctccatctagtaacgcgaaacgcgcctgcggcgcggccacccatgctaccgaatgccctgcccgctgccaaaagcagcgatacgggctttattgcaaagtgtgttgcgcaacgaactccgccggctgccagccagcgcggctcgccaggcggttcaactcggcccgcggcaggcgcacctgcagcagggtacaaccctcctcatcgtgcgcctcggactgcaccgcgcccagttcgaacaactgggcgcgcaggcgcccgagccgctggggcagacgcaaggttccgacgaacaggtcctcgccgagcagctcggcgatggcctggcgcaacaggtcgaggccttcgccggtctgcgccgacagccagacgcgcaccggcttgccggagtcgtcgcgctggatgtgcggctcgaccgagggtagcaggtcaaccttgttatagacctcgagcatcggcaattcgttggcgccgatctcgccgagcaccgccagcacctgctcgacctgcgcatcccgttcgggctcgtaggcgtcgatcacgtgcagcaggaggtcggcgttgctcgactcttccagcgtagcgcggaaggcctccaccaacttgtgcggcaggtggcggatgaagcccaccgtgtcggccagcaccaccggcccgagatcgtccagttgcaggcgacgcagggtggggtcgagggtggcgaacaactggttggcggcatacacctcggaggcggtgagcgcattgaacagggtcgatttgccggcgttggtatagccgaccagggagaccgccgggatatccgcgcgcttgcgcccgcgtcgagcctgctcgcgctggctgcggaccttctccaggcgctgcttgatctggcggatgcgcacgcgcagcaggcgtcggtcggtttccagctgggtctcgcccggaccgcgcagaccgataccgcctttctgccgttcgaggtgggtccagccgcgtaccagccgcgtactcatgtgctccagttgcgccagttccacctgcaacttgccttcgtgggtacgtgcgcgctgggcgaagatgtcgaggatcagcccggtccggtcgagtacgcggcactcgaacgcacgctcgaggttgcgctcctggctgggcgtcaaggtgtggttgaaaatcaccagctcgacgttttcggccttgaccaggtcgtgcaactcctcgaccttgccactgccgataagatatttggcgctcggctggtggcgggagacgctgacgaatgccaccgtttccgcgccggccgaacgcaccagctcctggaactcctgcgggtcttcacgcgcctcggggttctgcccttccagatgcaccagaacagcctgttccccaccacctgggcgctcaaagaacaaagcggactcccgtcaagcgttgcccggctcggccggctggtcaccgctcggcagacgcaccggacggctcggtaccacggtggagatcgcgtgcttgtaaaccatctggctgacggtgttcttcagcaggatgacaaactggtcgaaagactcgatctggccttgcagcttgatgccgttgaccagatagatggaaaccgggacgcgttctttccgcagggtattgaggtaagggtcttgtagcgaatgcccttttgacatgtgccgcactcctttaaggatcgtagtttgaagtagtcgaatagggtgacttggcgccgtccaaactccggagtcgttccggaaacagacggacaaattaaggtctcaggccaatatggagaccgttttcaggtatttcaaggcacgcggcagattgtcacctgctaggctgtccatccagtgtagatggctccagcttcgcagccaggtgaactggcgcttggccaactggcgggtagcgatgatgccgcgctcggtcatttcagcgtaggacagcttgccatccaggtaatcccacacctgacggtaacccacggctctaatagacggtaatcctgcatgcaagtcacttctggcatgcagtgcttcgacctcggcgatgaaaccctgttccagcatctggcgaaaacgctgcgcaatccgcgcgtgcaacacctggcgctgctcgggagcaatcgccagctgagcgacagtatacggcaattgattcctgcctgacgcgtcaaaatccgccttttcagcgctttgccggcgacgcaggtcgctcatcgacaccccgccgaggcgatacacctcgagcgcccgcatcagtcgctgcgggtcgttggggtggatacgcgcagccgattccgggtcgacctcggcgagttgccggtgcagcgcctcccaaccttcggcctgggcctcggcctcgatcgccgcgcgcacctcgggatcggcgccgggcatgtcggccaggccctcgagcaacgccttgtaatagagcatggtgccccccaccagcaggggaatcctgccgcgcgcggtggccttggccatcgccgccagggcgtcggcgcgaaattccgcggccgaatagctctccgccgggtcgcggatatcgatcaggcggtgcggatagcgcgccagcagctcccgggaaggcttggccgtaccgatatccataccgcggtagatcagcgccgaatcgacgctgatcagctcgcagggcagcgcatcggccagcgccatcgccaggtcggtcttgccggcggcggtcggccccatgagaaagatggcgggaggcagggaagacatcggaacgctcttggacaaagcgcatagcttcgggctttgcgcccgaagctgcaaggctcagcgtccgcgcaggaagagcttatccagctcgtccaggcccaactgggtccaggtcggacgcccatggttgcactggccgctgcgttcggtgatttccatgtcgcgcaacagggcgttcatttccggcaaggtcaggcgccggttggcgcgcaccgcgccatggcaggccatggtgccgagcagctcgttcaggtgcgcctggatacggtcactggtgccgtattccagcaggtcggcgatgacatcgcgcaccaactgggtcgcctccgcctgcttgagcagcgcagggatctgccggatcgccaggctttccggccccaggcgctgcagctcgaagcccaggcgctggaaccagctggaatgctcttccgcgcaatccgcctcgcgctcgctgaccgcgatcgactccggcaccagcaacggctgcccacgcaagccttcgctggccatcgccaccttgaggcgctcgtaggtgatccgctcgtgggccgcgtgcatgtccaccagcaccaggccgtgggcgttctcggcgagaatgtagatgcccttgagctgcgccagggcgtaacccagcggcgggatgtcctgggcactctcgggcaacgcggctggcgcctcgcccgcgggtaacggcgcgaagtaggccttgtaggcgccaccggcctcggccagagagggcggcgcctccggccgggtgtaggcggaatagccggaggagccgccggaggccgatgagccgccactccagcccacccgtgccgccggactctccagcacgctctcggccaggcgcatctcgccctgcgggccgaactcgccggcagcagcgccggtcggacgcggctcggtcaggctggtcgccccgggcggcgcgagctggtcgtcgggacggacctcgcccagcgcacgatgcagggtgccatagaggaagtcatggaccatccggctgtcacggaagcgaacttcgtgcttggtcgggtgcacgttgacgtccaccaccgccggatcgacttcgaagaacagcacgaaggtcggatgccggccgttgtacagcacgtcgcgataagcctggcgcaccgcgtgggcgaccagcttgtcgcgcaccatgcgcccgttcacatagaagtactgcaggtccggctggctgcgggagaaggtcggcaagccgacccagccccacaggtgcaggccgttgcgctcgacctcgatcggcagcgcctgctcgaggaatgcctggccgcacaccgcgccgacccggcgcgcgcgggccagctcgtctcgcgcctcgtgcagggcgaagatggtcttgccgttgtggcgcaggtggaaagccacgtcgaagcgggccagcgccaggcgcttgatgacctcctgcagatggtcgaactcggtcttctcggcacgcaggaacttgcgccgcgccggggtgttgaagaacaggtcgcgaacctcgacgctggtccccaccgggtgcgccgccggctgtacccgcggctgcatgtcgcggccctcggtttccacctgccaggcttcgccggcgtcggcggtacgcgaggtcatggtcaggcgcgctaccgagctgatcgaggccagcgcctcgccacggaagccgaggctcatcacccgctccaggtcttccagctcgcggatcttgctggtggcgtggcgagccagggccagcggcaggtcgtcggcggggatgccgcgaccgtcgtcgcgcactcgcagcaacttgatgccgccctgctcgacctccacatcaatgcgccgggaaccggcgtcaaggctgttttccaggagttccttggccaccgaggcgggacgctcgaccacctcaccggcggcgatctggttcgccagccgcggactcagcagctggatacgcggtgcttcactcatcactgggccgccagggcggtgctcgggatggacagggcctggccgactttcaggttgtcgctggacaggctgttgctgctacgcagcgcggccatgctcacttcatagcgctgggcgatcatcgccagggtctctccgggccgcaccacgtgctcgcgcggccccatggagagcttgccctgggcgcgcaaagaggcgatgtaggtaccgggcggcgggctctgctggaaatactggcggatgccgctggtgatcgaacgcgccaaggcctgctgatggctggcgctggccagcttgcgcgactcgttgacgttcgagatgaagccggtttccaccaggatcgacgggatgtcgggcgacttcagcaccatgaacccggcctgctcgacacgacgcttgtgcagcgaagtgatgcggccgacattggtcagtaccttgtggccgacatccaggctcgacgagagggtggcggtcatcgacaggtcgagcagcacgccggcgagcatctggtccttgtcgccgaggctgacgctgccatcgccgccgatcaggtcggaacggttctcgctgtcggccagccagcgcgcggtttccgaagtggcgccgcggtcggacagggcgaacaccgaggcaccgaaggcgctgcggctcggcgcggcgtcggcatggatcgagacgaacaggtcggcgcccttcttgcgggcgatctcggtgcgcttgcgcagcgggatgaagtagtcgccggtacgggtcagttcggcccggtaaccgcgcacctggttgatctggcgttgcagctcgcgagcgatcgacagggtgatgttcttctcgtgcaacccgcccgggccaagggcgccagggtcttcaccgccgtggccggcgtcgatggcgatgacgatatcgcgggtgccgcccttggttggcagcggcagcttggccaccggctgggtcggcgtcaccggagtgaccggcacgctcggggtcggcgtcgcgggtacgtccggggtcaggtcggcgccctggtcgtagagatcgaccaccaggcggttgccgtattgctggttgggcggcaggacgaaacttttcggggtgacctgcgccgacaggtcgaggaccatgcgcaggtcgttgggcgtgcgctgggcggagcgcaccgcggtgatcggggtgttgccgagcttgagaccgttgagctgggtcgccagctgggcgccgctgacgtcgatgacgatacggttgggcgcggccagggtgaacaggctgtgctgcaccggaccggagagatcgaagaccagacgggtgttgtccggagcgcgccagatccgcacgctcttgatttgcgcggcggccagaacctcgccgacctggcaggccagcagaatcatcaccccagtcaacaacgtccgcagacgcaagccccaacccatcgtttttctcatgctcccatggtcagggtggcacaccaggcttcgccccgcgcaccgtgcggtaccaggcgcagtgtccgtccacccgcttgggcagtaatggtaatgtccagatcggcggttggcaaaacgcccgcaccgcgctcgggccactcgatcagacagagtgcgctgccgtcgaaatagtcgcggatgccgaagaactccaattcctccgcatcggcgagccggtacaggtcgaaatggtaggcgcgcagctcgccgatttcgtaaggctcgaccagggtaaaggtcgggcttttcaccgagccggcatggccgaggccgcgcaggatgccgcgcgagagggtggtcttgccggcgccgaggtcgccatgcaggtagatcaccccctgccccccgctggcccgggcgatgcgcccgcccagttcgagcatcgcgtcttccccttcggcggacaggatcacttcagacacggactgcactcctcgagcaactgacgaacggtaggtatgagatcggtcgccgccagtccacgcccctgggcgccgagccgctcaccggcggcggcatgcagccagaccgccaggcaggccgcctcgaacgcctccacgcgctgggccagcaaggcaccggtgatgcccgacagcacgtcacccaggccggcaccagccatcgccggatgcccctgggaacagacggcaagtcgtccgtcgggcgcggcgaccaggctgccggcgcccttcagcaccaccaccgcctggtagcgacgcgccagttccagcgccgccgccgggcgatccgcctgcacctcggcggtcgagcgacccaacaggcgcgcggcctcgccgggatgcggcgtcagaatccatgtccgcagccctgctccgaccggttccagggccagcaggttcaacgcgtcggcatcccagacctgcggcaacggtcgcgaccggacagcgctcagcaggctacgcccccaggcgcgctggccaagaccgggaccgagcaccagcacgctggcgcgttcggcaagggccagcagttggttcgccgacgccacgccatgggccatgacctcgggacaacggctcagcaacgccggcacatgttcgacgcgggtcgccgccgagaccagcccggcgccgcagcgcagggcgctttccgcggccagtagcacggccccgcccatgccggtgtcgccgccgaccaccagaaggtggccgaacagccccttgtgcgcggtccgcggccgcgctgccagactcggcagggcatttcgtgccaaacggtgggcccggggctggagcccttgcaacacgacggcgtcgctgccgagttcgtcgaacaccagctcgccgacccgtgccggcgcctcgccagtgaacagcccgatcttcaggccgatgaaagtcactgtcagatccgccctgatcgcttcccccaataccgcgccggtgtcggcgctcaagccggaaggaatatccaccgccagcaccggcaggtcggcggcgttggccaggcggatggcctgcgcaaagggctcgcgcacggcacctgccaggccggtgccgagcaatgcatccactactacgccctcgagcacggcgcactcgctccagggctccaccacgaccccggtcgccagcgcggcggcatgcgcctgcgccgcgtcgccggcaagccgctgcggcgccgcgaccgccagcacccgcactcgccaacccgcacgttgcgccagcgccgcgatcaggtagccgtcgccggcattgttgccgtgcccggcgagcaccgtcagcgccgcggcctccggccaacggcggcgcaaggcacgccaggcggcgtgggcggcgcgctgcatgagttcgaagcccggcgtgccggcggcgatcaggcgcgcatcgaggtcgcgcacctgggcggcggaatagagggcgagtggcaggtcgtcgtgctggaaggtcatggtcatcggatcgattcggcgtcaggcgcgcagtctggcagaattatacctatcccatttcgctttccctcgtcttcgttgcctcccatgactccccaacctctggccgacaacctttccccgccggaccccacccgcctcgcccagtccatcaaggactggggccgcgagctggggttccagcaggtcggtatcagcgacgtcgagctgggcgagcacgaagcgcacctgcagcgctggctggaggccggctaccacggcgagatggactacatggcggcgcacggcagcaagcgctcgcgacctgccgagctggttcccggcacgctgcgggtgatctccctgcgcatggattacctgcccggcgacacgcgcatggcgcaggtcctcgcgacgccggaaaaagcctacgtctcgcgctacgccctcggccgcgactaccacaagctgatccgcaagcgtctgcaacaactggccgagcgcatccaggccgaagtcggcccgttcggtttccgcgccttcgttgacagcgcgccggtgctggaaaaggccatcgccgaacaggccggcctcggctggatcggcaagaacacgctggtgctcaaccgcaaggccggcagctacttcttcctcggcgagctgttcgtcgacatgccgctacccgtcgacccggcgatggacagcgagcattgcggacgctgctcggcctgcctggacatctgcccgaccgcggccttcgtcggcccctaccggctggacgcgcgacgctgcatctcctacctgaccatcgagtacaagggcgcgattccgctggagctgcgaccactgatcggcaaccgggtattcggctgcgacgactgccagatcgtctgcccatggaatcgcttcgcccgccccaccgggcagggcgacttccagccgcgccacagcctggacaacgccgaactcgccgaactgttcctctggagcgaggaggagttcctcggccgcaccgagggttcgccgctgcgccgcgccggctacgagcgctggttgcgcaacctggcggtggggctgggcaacgcgccctcgaccatcccggtgctggaggcgctgaaggcgcgccgcgggttcccttcggagctggtccgcgagcacgtggaatgggccctgcggcgccacggggaaacctagcccggccggcgcctgccgcccggtccggacggatcagagcttgatgaagtggtcgcggtagtggcgcagctcggcgatcgactcgcggatatcgtccagcgccaggtgggtgttgcccttcttgaagctctcgcggacctgcggcgcccagcgcgcggccagctccttgagggtggagacgtcgaggttgcggtagtggaagtagccttccagcctgggcatgtgcctatagaggaagcggcggtcctggcagatgctgttgccgcagatcggcgagctgcgcttgggcacccactgctcgaggaaggccagggtctgcgcctcggcctcggccatgctcacggtactttcccgaaccctctgggtcaggccggactggccgtgctggcgggtattccactcgtccatgccggcgaggatttcctctggctggtggatggcgatcaccggtccttcggccagggtgttgaggtcactgtcggtgacgatggtggccatctcgatgatgacgtcccggtccggatcgaggccggtcatctccaggtcgatccagataaggttctgcgggttctgcatggggagtcgctccagtcgctatgccgtgcattctagcgtggaacgccgccgcgcgaatgatggcggcgcgcccatgttaaactcgccgccgatttttcatgcggacgcatcatggccaaacgccacttgacccgccggcagagctggcgcatcgaaaagatccaggaagaacgcgcggcccgggcggcccgtcgcgagtcgcgtgccgtggaagagctggagggcggcgacctgggaccggagcagaccggccaggtgatcgctcatttcggggttcaggtagaggtcgagtccgccgacggccaggtttcccgctgtcacctgcgcgccaacctgccggcactggtgactggcgaccaggtggtctggcgcgccggcaaccagggcatcggcgtgatcgtcgcgcaattgccgcgccgctccgagctgtgccgcccggacatgcgcgggctgctcaagccggtggcggccaacgtcgaccgcatcgtcatcgtcttcgccccgcgtcccgaaccgcacgccaacctgatcgaccgctacctgatcgccgccgaacatgccggcatccagccgctgctgctgctgaacaaggccgatctggtcgacgagagcaatgccgaaggcatcgatgcgctgctgaatgtctaccgcaccctgggttacccgctgatcgaggtgtcggccttcaatggcctggcgatggacgaactgcgcggcgcgctggacggtcacgtgagcgtcttcgtcgggcagtccggggtgggcaagtcgtcgctggtgaatgccttgttgccaggtgtcgacacacgtgtcggcgacctctccacggtgaccggcaagggcacccataccaccaccaccgcgcgactgttccattttcccggcggcggcgacctgatcgactcgcccggcatccgtgagttcggcctggggcacgtgtcgcgagacgatgtcgaggccggtttcatcgagttccgcgacctgctcggacattgccgcttccgcgactgcaagcacgaccgtgaaccaggttgcgccctgctccaggctttggaggacgggcgcatcatgccgcaacgcatggccagctaccggcacattctggcaagcatgccggaaacggactactgaacctcagtcgcccttgatctgctccagcttcaggctgccgccgtcgtcgaacaggttgagcttcttctgcacctcgtccgccggtagcgaaggttgcgcgcccgccgccggtgcctcggcagccggcttcggctgctcgcccggggcagccgcgggggcgctggcttcgggagcgccggtctcgccttcgatggccttctgcgccttgcgggtcaggaccacgatgtcgatccgccggttcaccgggttcagcgggtccttgtcgtcgaacaggcgtgccgaggcatagccgacaacctgggcgatctgcccttccggatagccgccggcgaccagcgcacggcgcgcggcgttggcgcgattggccgatagctcccagttgccgaagtcgccgttgccggcatagggcttggcgtcggtgtggccgctgatgctgatcttgttcggcacctggcggatggtctcggccatggccagcaggatgtcctcgaaatacggctgcaggcgcgcgctgccgaggtcgaacatcggccggttggcggcgtcgacgatctggatgcgcaggccgtcgcgggtgatctcgaagtggatctggtccttgaagtccttgagcatcggattttcgtcgaccttgttctgcaactcctgcagcagcagcgccaggcgctctcgctcaacctgctcggcgaggttctcggcctggtcggcgttgacctggtggtcctgctcggggctgatccggctttcgttggagtccggctgggcctggacctgcggattgagggtcttgtccggcgccggcgtcggcgtgccgccgaggtcgatgacgtaggggctggcgctttcgctgaaaccgatggggtcctggaagtatccggaaatcgccttcttctgctccggggtggccgaagacagcagccagagcaccaggaagaacgccatcatcgccgtggcgaagtcggcgaaggcgatcttccacgagccgccgtggtggccggcggcatagcgcttgacgcgcttgacgatgatcggctggttattgtccatctatcgacagtgcctccactcagcggccacgcacggcctgctcgagctcggcgaaggtcggccgatgggcgggcagcagcaccttgcggccgaactcgacggccagcgaaggcggcatgccggaagcggaagcgaccaggcaggccttgatcgcctcgaacaggttcaactcttccttggcatcgtgctccagggcgcccgccagcgggccgacgaagccgtaggcggcgagaatcccgaggaaggtgcccaccagggcggcggcgacgtggtggccgatctccgcctggctgccttcgccaagcaacgccatggtgatgacgatgccgagtaccgcggcgacgataccgaagcccggcagggcgtcggcgaccttggtcaccgcgtgggacggatgctccaggtcctccttgagactggacagctccatgtcgaacaggccttccagctcgtgcggcgccatgttgccggaggacatgatgcgcaggtagtcgcagacataggcggtcatccgctcatccttcagcacaccggggtacttgctgaagatggggctggccgcggggtcttcgatgtccgcctcgatcgccatcatcccttcgcgccggctcttgttgaggatctcgtagagcatgcccagcacctcgaggtagtaggtctgggtgaagcggttgctgaacatcttcggcgctttcttcagcaccaccatgaacgtgctgcccgggttggactggaggaacgcccccagtgccgcgccaccgatgatcaggacctcgaagggctggatgatggcgccgatcttgccgccggagagcaggaagcccccgaggacactggcgaaaacgacgatgatgccgatgatttttgacatgaggaccggacgtgcgaaatgaacaggataaggagggggactgctaggctccctcttgttatcggttgctagccgcaagactatagtccgaatactcgaaaagccagttcgccgcctcgccgacaccgagcccgacacccatgacagaccgcctcgccgcctggctcgaagagctcgaccggcaacccctgccgatccccgccagccactatgccggcctgcacgccgcgctgagcgacagccgtcgctcgctgcgcgagatcgccgaccagttgcagggcagcccgacactggcgttgtccatcctgcgcgaggccaatcgcgccgagagcgcccgcgacaaccccgcggaaagcctggaggtggccctcagccgcctcggcctggcacgcgcgagccaacttctgaagaccctgccgagcatccaggatgcggagatgcccagggtcctcgggcagatgctgctgatcagccagcacgccatgcagcaggccagcggcctgttcggcgcgcgcctggccaggctctggcaggaaatccactggggcagcctgctgaccatggctccggtctgggcgctggccaacgcccgcccgcagctactggagcaatggcagcaacgcgtgctggtacagggcgaaccgaccctgcgagtggagcgcgaactgctcggcatgcgcctgctgccgatctgcctggcgctggccgaacgctggcggctaccgcagtgggtcatccagggctatcgcctgctcgcctgcgaccgtcgcctgctggttcgagccctgcgtatcgcccgcgaccatcagtcgcccctgctccagcaacagcaactcgatgcccagcccgatctcgcccgctggctgacccagccggccaactgcactctcctcgccaatggcctggccatcgccgcgcaccagagctgggacgggccacacatgctgcgctggcagcgcctgaccggcctgtacctgggccagccgctgaccgaagtccagcagcaggtgcacatgctcgccgcgcaaagcgcgcgcctgcacgcccggccgccgctgtggcatccggcggtggccttgatctggccctggcaggccagccgctggcgtgccgaagcggcgcccccgccgccgccctcggcggaagccctggccgagtggcggcagcattgcgccgagttgctccgcgagcccagcccgttcagcaacgtggtgcagctcaccgcctgtgcccgcgatgcgctgcgcgcctgcggcctacaaaggatgctgctgctggtggccgatcgcacccaggtacacgtgctggcgcagcagagcgccggactcgaaccgggccaggagaaattgcaactggagattgccagcagcccgctgctgaagaaactgttccagcagcctgccctgctgcgcatcggcccgaacaaccaggaccagttgctgccggccctcggcgaacccttgcgccaactgttccccggacctcacctgctgctgcgctcgctgggcaacggctcgcgggtggtgatgctggtcctggccgacctcggcggccagccgttcagcgacctgcatgcccaggccttcgccaagaccgcccagtgcaccgagcgcgcgatccagcagttcggccgccagcgccgcacggaatgagggacatgcccggcacactggtcgggcgcgctttccgttaaactgctgcccttcttcaacccgggggtactcgcatgtccgtcttctccgacctgccattggtgatcgagcccagcgacctcgcgccgcgcctgggcgcgcccgagctgatcctggtcgacctgaccagtgccgcccgctacgccgaagggcatatccccggcgcgcgtttcgtcgaccccaaacgcacccagtggggacaacccccggcacccggcctgctaccggccaaggccgacctggaggccctgttcggcgagctgggccaccgcccggaggcgacctacgtggtctacgacgacgaaggcggcggctgggcgggccgcttcatctggctgctggacgtgatcggccaccaccgctaccactatctcaacggcggcctgccggcctggatcgccgacgcccaggcgctcgaccgcgaggtcccggcgcctgtcggcggcccgctgccgctgacgttgcacgacgagcccagcgcgacccgcgaatacctgcaaagccgcctcggcgccgccgacctggcggtatgggatgcgcgcaaccccagcgaatacgccggtaccaaggtgctcgccgcgaaggccgggcatgtgcccggcgcgatcaatttcgaatggaccgccggcatggacccggctcgcgccctgcgcatccgcgcggatatcgccgaagtcctggaggacctcggcatcacgccggacaaggaagtgatcacccactgccagacccaccatcgctccggcttcacctacctggtggccaaggcgctgggctacccgcgggtcaaaggctacgccggctcctggtcggaatggggcaaccaccccgatacccctgtagaggtttgaggaatgtcgttcaaagatcgtctgttcatctgcagccagtacctgctgccgcaccacctgctgtcccggctgatcggcttcgccgccgactgccgggcgacctggttcaaggaccgcctgatcgcctggttcgcccggcgctaccaggtcgacatgcgcgaagcgcaggtcgaggacctgcaggcctatgaacatttcaatgccttcttcacccgcgccctgaaggatggcgcccgcccgctggcccaggagcccggcgcggtgctctgcccggccgatggcgcgatcagccagctcggcccgatcgagcacgggcggatcttccaggccaaaggccacagctacagcctggccgaactgctcggcggcgacgccgaactggccgcgcccttcatgggcggcgacttcgccaccgtctacctgtccccccgggactaccaccgcgtgcacatgccgctggccggcaccctgcgcgagatggtctacgttcccggccggctgttctcggtgaaccagaccaccgcggaaaacgttcccgagctgttcgcccgcaacgagcgggtggtctgcctgttcgacaccgagcgcggtccgatggccgtggtgctggtaggcgcgatgatcgtagcctccatcgaaaccgtctgggccggcctggttacgccgccgaagcgcgaactgaagaccttccgctacgacgaagccgcccgtgcgccgatccgcctggaaaaaggcgccgagctcggtcgcttcaagctgggctccaccgccatcgtcctgttcggcccgcagcaggtcgcgttcaacgacggcctcggggcagcgagcccggtgcgcatgggcgaatgcctggcactgccgaaacagtcctgacctcgccgggacggagcgccccgagcgcctccgtcccgtctctccccgccgccgggacctcccggcgggatcgtggcgtccgaaggctgcgggtccatttcgatgctgctagagttcggaaaggtcctatcgagcctgtgccgacccctcggtcaggaaagcggactgccgcacagttcctgtcctggccacgacgatgaacccgcctcccgtgttaagaaagaggaggcgcagccgcggcgatcggaagtccggcacctctccggggcttcatccccccgtagagccttttcagtagcggagccgtctaaccccccatggaaaaccagagcccccacctctcgttgcgcgtccccactccgacgcagcagaacctgagcttctgcgacgccaccccgaaggacatcaagtactggctggcgcacctgcccaaggccaacctcggggaaaccgcgcgccagctctaccagggcctgatcgaactcaaccagttggtgctgcccgtcgaggcccgcctgcaactgctcgaactgttccgtccagaggtgcatttcgtctgcgcccacctggaacggcacttcctcaaccaggccatcgtcctcgacgaacggccgcgcaagatcgccaacctctgccaggccctgcagaaccacctggccatcggctacaagctgatcgtggtccaggaagcgccgcgcaacagccgcgaccgcgcgcagctgttcgcggtcggcatccagcgggcgatccgcagcctgtgcgggccgctgatccgcgccagccagttgtactgcccggtccccgaggggctttggctggaactccaccagctctaccagttggccagccagcgcggcgtgcatcgtctcgcggtgcgcgacgaactggccaagcacacccccggcctgagcgtcgagcaggcctacctgattccgctgctgctcggctgcgcgcgctgcaaccagatgcgccagaacaacattgcacggctcgccgaggtgctcgaaccctggagccagctgctgtcgatacagagcgcgacgctgcccggctcgctgttcatcgccgtgccgcagatcgacggcccgccgcgctaccgttcgctgtacccggagacccaactggccagtgccctgggcatcgacacccagccgctggtcgagctgatccgcgaatacctgctgcagcccgaggccgaacgcgcgaaagcacgcctgccgctgatcgaaggggtgaccctggacctgctgcaacatctctcctcggcctggggtgacatcgccgaacgtaccttccagcgcacccagggccagggccagttgaccctgtgcatcggcatgagcgccctgcactacttcctcgccgggcgccgcccgttcaacgaggtcctgcagatccaggaagcgcccgaggcgcctcgcttcaaggccgacgtccaggacgcctgggccggcgccttcgatgcacagaaggtcaccgactggcagcccggcatgccgctggaggaaatcgagtaccgcccgcaccagtcgccccgcagtgtgcaacccgggcacccgcaggcccacgcacaggctgacgccaccgaggactacccgacctacgccctgcccatcgtcaaccacagccccggcggctattgcctgagctggccgaaggaggtgcccgcccaactgcaggcgggcgaactggtcggcctgcaggaccttccaggccaggcgtggagcatcgcggtggtgcgctggatccgccaggtacgcaatggcggcacgcagatgggcatcgagatgatcgccccggcggcacagccctgcggcctgcaactgctgcgcaagaccgagcagagcagccactacctgcgcgccctgctgctgccggcgatcgccgcgatctcgcggccggcgacggtgatcaccccgcgcctgccgttccaggagggcagccgggtgcagatcaacctgcacggcgaggagcggcgcgcggtgctgaatcgccggcaggcctcgaccggcagcttcagccagttcgaataccgctcggcggaaccggtgaacaccccgagcgataagccggtcacagcgccagtggcccggccgcctgcgggggaggaagattttgactcgctctggaagtctctgtagattgccccgacacctccattcgccgtcttttcgcgcccgcccggacgcggactgagccctttccatggccatcgaaaagaaaaccatccgcctgctgattctggaagactcgcagaacgaagccgaacgcctggtcagtctgttccgcaatgccggccacgcgacccgcgtacatcgactgacctctcccgaggacctcgccgaaaccctccagcaaagctgggacctgctgatcgccgcgccgaccagcgagtgtctcgagcccggcgaggcgctcgccaccttgcgccgccagtcgcgcgacatcccgttcatccagctggtggccgacaacaactccgacgccatcaccgacgccttgatgctcggcgcccaggacgccctgccgcaaggcgaggacgagcgcctggtgctggtcgccaaccgcgagctggccggcctcgccgaacgccgcgcgcgccgcgccgccgaactcgccctgcgcgaggcggaaaaacgctgccagttgctgctcgacagctcggtcgacgccatcacctacgtccacgacggcatgcacatctacgccaaccgctcctacatggcgctgttcggctacgaggacgccgaggaactggaaggcctgccggtcatcgacctgatcgcctcctgcgaccagggcgccttcaaggatttcctcaagggctaccagaacgaccagcgccagaccgaactggtttgcaccggggtcaagctcgacggccaggaattcaaggcgcgcatcagcctctccgccgccacgtacgacggcgaaccctgcatccaggtggtgatccgcggcgaggtcgacaacgccgagctggaagaaaagctccgcgaagtcagcagccaggacccggtcaccggtctctacaaccgcagccacttcctcgacctgatggatgccgccgtgcagcaggcggtgaccgcccgcaagccgtcgaccctggcctatatccatctcaacggctacccctcgctccaggccgaccacgggctttccgggatcgacctgctgctcggccagttggccggactgatgcgtgaacagttcggcgaggaagccgacctggcgcgtttcggcgattcgatcttcgccgccctgttcaagggcaagactcccgagcaggcgcaagcggcgctgcaacgactgctgaagaaagtcgagaaccaccttttcgagctgaacggccgcagcgcccaggccaccctcagcatcggcgtcgccggtctcgacgagaagaccgccaaggcccaggacgtgatgaaccgtgcgcatcgctgcgccgatgacgcggcacgcaagggcgggtcgcagatcaagcagtacaacccggcggaagagcttgccgccgccgcccagcgcggcgacgtcatcgcgatcctccagcaggcgctggagaccaacagcttccgcctgctgttccagccagtcatcagcctgcgcggcgacagccacgagaactacgaggtgctcctgcgcctgctcaatccgcagggccaggaagtgccgccggcggagttcctgcatgccgccaaggaagccgggctggcggagaagatcgaccgctgggtgatcctcaattcgatcaagctgctcgccgagcatcgcgccaaggggcaccagaccaagctgttcgtccacctgtccagcgcgagcctgcaagaccccggcctgctgccctggctcggggtggcgctgaaggccgcgcgcctgccgccggagtcgctggtgttccagatcagcgaagccgacgccaccagctatctgaagcaggccaagcaactgacccagggcctggccaccctgcattgccaggcggcgatcagccagttcggctgctcgctgaacccgttcaacgcgctgaagcacctgaccgtgcaattcatcaagatcgatggttccttcgtccaggacctcaaccaggtggaaaaccaggagatcctcaagggcctgatcgccgaactgcacgaacagcagaagctcagcatcgtccccttcgtcgagagcgccagcgtcctcgccaccctgtggcaagccggcgccacctacatccagggctactacctgcaggggccgagccaggcgatggactacgacttctcctcgggagacgaatgaagaacgggcgccctgggcgcccgttgcttttccgctctaccgacctggttcgtggctgccgggccggcaagagacgcccgccggcctcaggctcgtccttcgcggtcgcggtagccgagcaggtagaggatgccgtccaggcccagggtcgagatcgcctgcttggccgactgcttgaccagcggcttggcgcggaacgccacgcccaggccggccaggccgagcatcggcaggtcgttggcgccgtcgccgacggcgatggtctgctccaggctcaggccttccttcgccgccagttcgcgcagcaggtcggccttgcgctgggcatcgacgatcggctcgaccgccaccccggtgaccttgccgtcgacgatctgcaactcgttggcgaacacgtagtcgatccccagcttcgcctgcaattgacgggcgaaataggtgaagccgccggacaggatggcggtcttgtaacccaggcgcttgagttcggcgaacagggtttccgcaccctcggtcagacgcagcgaggcgccgatctcctccagcacgtcttccgacagcccctgcagcagcgccaggcgctccttgaagctggcgcggaagtccagttcaccgcgcatcgcccgctcggtgatcgcggcgaccttctcgccgacgccggcggccttggccagttcgtcgatgacttccgcctcgatcagcgtcgaatccatgtcgaacaccgccagccggcggttgcggcggaacacgctgtcctgctggaaagcgatgtcgacgttcaattcctgggcgacgctgaggaattccgcacgcagcgccgccggatcggccggttcgccgcgtaccgagaactcgatgcagcccttgccctggtcggcgggcatgtccagcggcatacgcccggagagacggtcgatgtggtcgatgttcagcgcgtacttggcggtgatcgagctgaccctctgcagttgctcggcagtcacccggcgggtgagcagggtcacgatgtgccgcgccttgccctggccgtcgacccattgccggtagtcctcttccgagaccggggtgaagcgcacctgctggtccagcttgtaggcggtgaacagcacgtccttgaggaccgaggaaccggcctcggtatccgggatttccaccaggatgccgaacgacagggtgtcgtggatcaccgcctggccgatgtcgaggatgttcaccccgccctgggccagtacgccggtgatggcagcggtgagaccggggcggtcttccccggtgatgttgatcaggacaatttcgcgcaaggcgtaagctccgccaggtaaaagacgccattctacccgctttcccgcacacccgagagacgcagagccgagcatttgccatcaccaccggtcggaaccgaccgggaaaacccgcgaaaccgccgcgcggcggcctggaaagcgcgtcaacggccctttgcccctcggggggcgctggttatactgcgcgatacctctatttcagaagaccgagccccctgtgacccggcccacgtccgtcaagcccgacaatttcttcctcctgctgtttcgtgccttgcgccagcgccgcgtcccgatcgccctgcggctcgccagccatagcctgatcctggtggccctggccctgctgatctacgcctgggtcatgggcatgcagtttcgccaggccatgcaacagcaggccgatgccctgggccagagcctgatcacccagaccgccgcgtccgccaccgagctgctggtgtccaacgacatcctcagcctcaacgtgctgctgaacaacctggtgaagaacccgctggtggcccatgcggcgatctacagcgtcgaccagcgcatcctcgccgaggccggcagccgtccgaagcagagcctgctcggtgccaccgaaggcctgtactcgacgccgatcaccttccaggaagtgatcgccgggcacctgcgcatcagcctggacatgcagcagttccagcagccgatgatgatcagcctgcagagcatgggcctgatcagcctgatcctgctgatcctcgccctgtatttcagcctgcgcctggggcggcagatttccacacccttgttgcaattgcgtgtctggttgcgcgatccggacaatccggcccccggcgccgaactgcagaacgagctgggcgacctggcgcgcgacctggaagagcgcctggtgccggagaagccgccggcgccggagccggaagaagcaccgctgccgcagaacttcgacgacatcctgctggaagacgacgaagccgacctgcgcagccgcaaggtcgaggcctcggccttcgaggaagacgacattccgctgggcgacgccctgctggacgagaccaagccggtggaattcacctccatcgacgaagacccgctggaccaggacgccttcgacgagaacggagccgaagccggggaacagcccgctgcgcgcgaaccgcaacacagtgcggtgctggcgatccagctcggcgcccaggaacagttgcgccggttgccgcgcagccgcctggtggatctcctgcaacgctatcgcgactgcctggaacaggccgcccgccagtacaagggcagcctgcacacgctcagcgacggcggcagcctgattctcttccacagccgcgacaaccgcgccgactacctgaccaacgcgctctgctgcggtgaactgatgcgtgcgctcggccatgccctgcagatcgaggtcgccgacagcggcatcaccttgcaactgcaactgggcctgagcctcggcgaagacctcagcgaacagacccaggccgacctgctgctcaacgaaaccgtgcagaacgccctcgccctcaaccagcacagccgcaacctgctgctggtcgaacgcagcatcgccgacgacgcggtggtccgcgagcgcgcccgtatccgcgccatcgccagtccggaaggagcctgctgcgtcgagcgtctgctggagccgtatccgtcgatgctcgagcgccaactggcgcgcatgcacgaccgcgcccgcccgtgaccaccctgatcacccacccgctgccggtcctggcggtgggactggcccttggcagccgggtgatcccgccacacctgctgctggcaggcatactcgccgcctgcctgccggacttcgacgtagtcgccttcaagctcggcatcgcctatcacgatgccttcggccatcgcggcttcagccattcgctattgttcgccgcgatcctcggcgcgctcgccgccctcgcctgccggccgctgcatagcggaccgctgaaagccgggctgtgggtagcgctggccaccgcctcgcacagcctgctggacgcgatgaccaatggcgggctgggcgtcgcctggttctggccctggagcgacgcccgctacttcatgccgttccatccgatcgccgtgtcgccgatcggtctgtcgcgcttcctcagcgaacgcggattgctggtgctgcaatcggaggcgcgctgggtctggctgccctgcctgctgctggcgctcgccggcatggccctgcgcttcctgttgcgccgctcacgctgacgccgaaacgaaaaagccccgcttcggcggggctttctcctagtcggctatcgacaatcagaaccgatagacctcggcgtcggtgcgaatcggcaccaccagtggcattttcggaccttcctcttccttgaccttcggcttggccaccggcttgcgcgcggtcgccggcggcggcgcctcggccgccacggcgatcggcttgacgtccttggccaactgcgccgccaggcgcttgagcaggtcgctctgggcacggatctggtcgccgatgctgccctgatgctgttcttcctcgtggaacacccggctgtccttcaggtcgcccttctggtccaacaggcgccagcgcgcctcgatcactgccggctgcttggggccggagtcgaggcgactgatggtcagcatcacctggacctggggggtgaaaccgggtttttccgggaacagcgccaggcggctgctgcccagctcgctggacatctgccgcagcagttgctggctgacattggtctccaggttgccggcccagcgcgcttcggtggacagactgagaataccatcggcctgccgctgcaccatcacatcgcgcttgagatagtcggccagttgtaccggcccgagcaggacggccgcaccgccgtcctttttcggtaccgcagcggcaccgacgtccaactggtagagctgggccggcggatggaccgcacaacccgtcagcccgagcaggctgacgagggaaagacatgcgaagacgcgccacgcgctcatcgagaaccaccgtatttcgccgaagatcggcactactgatgcaagacttgaattctactggccacccgccatcggaaacggcggccgaaggggcgtatcatcccctaaccagcgccatagctccagaggcagagcgtattccgaaaccggtttcggaccacctgcgtcaggggaaaacccggcggaacccgccagggagacgacattcccccggaaagccggcctcggaagaggccgctttcgccattcccttgcggatatgcgagagatcggagaccggtaacggctcatttcaatcctgtggcggaatatccaccagcaggctgtcgacgcgctggaaaccgcgcggcagcttgttgcctcgccggccccgctcccccttgtagtgttccaggtcgtcgcccttgagcgacagggtacgctttccggcctgcaggaccaacgtcgccccggctggcagaacagccaggtcggtgaggtattcctcgcggctggccacgcgttcgccggggatgccgatgatcttgttgcccttgcccttgccgagctgcggcaggtcggagaccttgaacaatagcagacggccctcggtcgtcacggccgccagccaatcctgctccaaatcgcgcaccgggcgcggcgccaccacggcggagccgttgggcaggctgagcagggccttgccggccttgttcttggcctgcaggtcctcgcccttgaccacgaaaccatagccggcgtcggaagcgatcacgaacagcgcatcgtcgtccggcagcagcacgcattcgaagctggcccccggcggcggcgtcagccggccgctgagcggctcgccctggccccgcgcggacggcaggctgtgggccggcagcgagtagctgcgcccggtggagtcgatgaataccgcatactggttcgagcgtcccggcgcggcggccttgaagccgtcgccggccttgtaggagaggccggcggcgtcgatgtcgtggcccttggcgcaacgcacccagcctttttccgagagcaccacggtcaccggttcggtgggcatcagctcggtttccgacagcgcgcgggcctcggcgcgggcgacgatcggcgaacggcggtcgtcgccgtaggtctcggcgtccttgatcagctcctcgcgcaccagcttcttcagcttggcctcgctgccgagcagggtctgcaggcgcttctgctccttcagcaactcttcctgctcgccgcggattttcatctcttccaggcgtgccaactggcgcaggcgggtgtcgaggatgtagtcggcctgcacctcgctgagttcgaagcgctccatcagcaccgccttgggctgatcctcggtgcggatgatgtggatcacctcgtcgaggttgaggaaggcgatcagcaagccatccagcagatgcaggcggcgctcgaccttgtccaggcggaactgcaggcgtcgacgcacggtgccgatgcggaactgcagccactccgagagcaactggcgcaggtccttgacctgcggcttgccgtcgaggccgatgatgttcaggttgacccggtagctggtttccaggtcggtggtggcgaacagatgggtcatcagctcttcgacatcgacccggttcgaacgcgggatgatgacgatgcgggtcgggttctcgtggtccgactcgtcgcgcaggtcggccaccatcggcagcttcttggcctgcatctgcccggcgatctgttccagcaccttggaaccggacacctggtgcggcagggcgtggatgacgatgtcgccgtcctcgacgcggtacaccgcgcgcatgcgcaccgaaccgcggccggtctcgtagaccttctgcaggtcggcgcgcggggtgatgatctcggcttcggtggggaagtccgggcccggcacgtgttcgcacaattcggcgaccgtcgcgcccggctggtcgagcaggcgcacgcaggccgacgcgacttcccgcaggttgtgcggcggcacgtcggtggccatgcccaccgcgatgccggtggtgccgttgagcagcaggttgggcaggcgggccggcagcacggccggctcgtcgagggtgccgtcgaagttcggtacccagtccacggtaccctggcccagttcgctgagcagcacctcggaatagcgcgacaggcgcgcctcggtataacgcatggcggcgaaggacttgggatcgtccggcgccccccagttgccctggccgtccaccagcggatagcgataggagaacggctgcgccatcagcaccatggcctcgtagcaggccgagtcgccgtgcgggtggaacttgccgagcacgtcgccgacggtgcgcgccgacttcttgtgcttggaatcggcatccagccccagttcgctcatggcgtagacgatgcgtcgctgcaccggtttcaggccgtcgccgatatgcggcagggcgcggtccatgatcacgtacatggaatagttcagataggcctgctcggtgaactcggccaacgaccggcgttcgaccccttccaggctcagatcgagggattcgctcatgcgtacctcacggagaagtgttttggcgcagcaccagggtgccgtcgcgctgggtgaattcgagttgtttcagggcgctcatgccgagtagcacctcatcgccgtccatgcccggcgcaatcagcgccgcgaccccggacaggcggatatcgccgagttgcagctggtccagccgcgtgcgccagcccgtggcgcggccgttggccgtgctcagggtgatcggcgcgccgcgctccagcgcgagtcttgccgccagggcttccggcaccgccacctgggtcgccccggtatcgagcaggaaggtcacgccctggccgttgatctgcccgttcagcaggtaatggccctggcggctgctggccaggcgcaactcgacgtagccgtcgccatggatcgattgcggcgcctggttcgggttgcgctgtcgatcttcccagacgccgaaatagcgcgtcgccagcgccagcccggcgatccaggccagcaccagcatgatccgtcccagccgctgaccgggcgcccgttgcgtcacttgtcccccaaccagccgccggcgggcgcggcgaagcgcaggacgaagggccgcacgtcgccatcggcgcgcgcatggtcgccattgtcgatgcccagccaggcgcccttgtcgtccagcgacagggcttccgcgacgccataaggcagctcgtagcgacgctccggcgccaggaccgccgaggcgaacgaccagcagcgctcgaccttggcctgggccaggtcgcggcgacagatctgatgcgccaggcgctccagggtgaacagcttgccgcggtagaaggcgaggtcggagaaatccttcggcagcttgcgcgcgctgcccagttccggcggcggctcgatcttgccgccctcggcgagcagtacgcagctgccctcgcagcgccaggcactgttgtcgcggtgggacaccagcaggccgcggcgctcgcgctcggcagccagccagaggcgcttgccctcggggtcgacggcgatcccttcgaacagcgcgttgaaattcatcagcatgccgctggcccgcgcttgcggcagcaggccgggcggcaggcgcagccagttcggcgcgccgctcaccggcagttgcaggaccgccgcgtgcgcctcgctgaccaggtagcgattgccggcggcatcgcaggcgatgccttcgaagtcgaggttgccgccgcgcaccaggccactgagccagacccgcgtgctcatgccccagggcaacccgctgtccggcggggtcggagcgatgaaactctcggcctcggcctgccagggctggtcggagccttcggccgagggttgcaggcgatacaggcggtcgtcgtcgcggtcggaaaccgtccacagcgcgccgccacaccaggccagcccggagaggttgccgccgcgcatgccctccaccgcatgttcggagatgaagctcaaggctgccggaaccggtggctctggcggcgcctcggccgcctggaccaggcccccgaacaggccgaggatggccagcaggcggcgcatcagaccagcacctcggccaggttgcccttgctttccagccaggacttgcggtcaccggcgcgcttcttggccagcagcatgtccatgatctccagggtaccggtggcgtcctccagggtgagctggaccagccgtcgggtattcggatccatggtggtctcgcgcagttgcagcggattcatttcgccaaggcccttgaagcgggtgacctgcggcttgccgcgcttcttctcggcggccaggcgctcgaggatgccgtcgcgctcggcttcgtcgagggcgtagtagatttccttgccgaggtcgatgcggtacagcggcggcatcgccacgtagacatggccggcttccaccagcgggcggaaatgacggacgaacagcgcgcagagcagcgtggcgatgtgcaggccgtcggagtcggcatccgcgaggatacagatcttgccgtagcgcagctgggccaggtcgctggcgcccggatcgacgccgatggctaccgcgatgtcgtggacctcctggctggcgagcacctcgccgccgtccacttcccaggtgttcaggatctttccgcgcagcggcatgatcgcctggaattccttgtcccgcgcctgcttcgccgagccgccggcggagtcgccctcgaccaggaacagttccgcgcgcatcggttcctgtccggcgcagtcggccagtttgccgggcagcgccggcccctgggtgatcttcttgcgctcgaccttcttgcccgccttgaggcgacgcccggcgttgctgatcgccagttccgccagttgcaggccgatttcggcgtgctcgttgagccacaggctgaaggcgtccttcaccacgcccgagacgaacgccgccgcctcgcgggacgacaggcgctccttggtctgcccggagaactgcggctcctgcatcttcatcgagaggacgaaggcgatccgctcccagacgtcctcgggcgccagcttgacgccgcgcggcaacaggttgcggaactcgcagaactcgcgcatggcgtcgagcaggccctggcgcaggccgttcacatgggtgccgccctgggccgtgggaatcaggttgacgtagctttcctgcaccgactcaccgccctcgggcagccacagcagggcccagctcaccgcttccttggaaccttcgaggttgccgcagaagggttcatcgggcaggcgcggcagctcggcgaccgcgtcggtcaggtaggagcgcaggccgtcctcgaagtgccactcgacgcgctcgccggtgttcttgtcctcgaacaccacgctcaggcccgggcacagcaccgccttggccttgagcacatgcttgaggcggctgaccgagaacttcgccgaatcgaaatacttcggatccggccagaaatgcacgctggtaccggtattgcgcttgccgaccgtgccgatgacttccagatcgctgtccttgaagccgtcggcgaaggtcatccggtactcgttggcgtcacgcttgacgcgtacctcgacccgggtcgagagcgcgttcaccaccgagatgccgaccccgtgcaagccgccggagaactggtagttcttgttcgagaacttgccgccggcatgcagcttggtaaggatcagctcgacgcccggcacgccctcttccgggtggatgtccaccggcatgccgcggccatcgtctatgacttccagcgagttgtcctggtgcaggatcacctgcacgctcttcgcgtggccggccagggcttcgtcgacgctgttgtcgatgacttcctgggccaggtggttggggcgggtggtgtcggtgtacatccccgggcgcttgcgcaccgggtcgaggccggaaaggacttcgatggcgtctgcgttgtaagtagccatggggtctctattcagtcaaaagtcgaaaagtcggtgtcgcgccacagcgccgacgggtagccggcgaacgccagcagcgccggcaggtgccgggcgaagccctggaaaccgtggtcgccgccggcctggatacgtagcgcgcaggctcggtagaaggcctgcgcgacgcgataatcgagggtttcgtcggcggtctgcagccatacctggtagcgttcgggacgttgcaggtgcgtgacttccagttcggccaacgccgccacgtggtcctcggtgagttcccaggtctcgccgctgtagtggttggtctgcgcgcccaggtagccgtcgaaggagcgatgcggggcgaccgccggattgaccaggatcgccgccaggccatggcgctccgccaaatgggtcgcatagtagccacccagggagctgccgaccagcaccggtcgcccgagctcggcaatggcccgctccaactgggcgatagcctgccgtgggtgatggtgcagggccgggacgcgcaggccttcggccaggcccaagtggccgaaggccgcctgcagctgacgcgccttgtgcgattcgggcgaactgttgaagccgtggatatacagcagggatgggctggtcgcggtcatcgggaacgggctaatgggcttcaactcggtagggaaagccgaacggtaccagcttccaggcttcatcttccagcctgcgcgccgatcggcaacgacgcacgtggccgcggtatcccgcgaccgggggcatgtcagtatccggcggtgtcgtagtccacttcgaagacgacgtcgtcgacccgcgagatccccgtttccaggcgcccgtcgtcgtgcaggcgcaaccagcggtagcccggcgccaggcggtcgagggtgaagtcgctgctgccgggggcgaactgtacgcaggtggacggcgaagccagcaggcgcagcgggccgcgctggcggtcgaactcctggtgaatgtgcccccacagcaggcagcgtacctgcggatagggcgccagcaggtcgaacagcgcctgcgggttgcgcaggccgatgggatccatccagtcgctgccgatcggcaccgggtggtgatggaaggaaaccagcaggaagcgttcgccggcgctgtcgatggcgcgccgcagcagctccagctgatcctcctcgagatagcccggcaccgcgccgggaatgctcgagtcgagcaacaccacgcgccagttgccgacgtcgacgacctgctccagcaggtcgctgccctcggtcgccctttgcatcggctcgcgttcgtcgtggttaccggcgaaccagcgcaacggcgcgtccaggggggagctcaacctgcggaagcgtgtgtaggaatcgaggctgccgtcctgggagacgtcgccggtggcgagaatcaggtcgatccgcggctgctcccgggcgacccgctcgaccaccttctccaggctatgggcggtatccatgccaagcaggcgcgcgccatcctcggcgaacaggtggctgtccgagagctgcaccagcagtacggaggcgtcggtggcgggagtgttcgaatggcgtgacaaggggccgtctcctgaaggcgaggcgtccgcggtgaaagggatgattatggtgaccgacgaaagtggcggcaaacccggaaagcggaacagatcacagttgcgaggactacttttggcttgatgtcattcaactggccttttgcctgcaaccgctcagcgctgggccaccggctccatttcgtggccgcaggccaggcaatgggcgagccactcgccgaggaacaggttgagctggttcttctcgtcgggctggtgcatcgcctggttcgggtagggatagatcgccatcagccgccgcgcctgttcggcgccgatcacctcggccatccgcgcatcgtggtagacccgcacttccagccgcggcgccggcaaccagggcaggcccagttcctggcgcacctgaagggtggtggtgtaggggcaggcctcggtcacttccagcgcaagtacgccgagcagccgctccccttcgctcagcgcgacccggcgcgaggcctgcgcctcgcgcatgtccgggagcaggcgcatgagtcgcgcgtagttcgcttcgcaggtcgcctgcaggctggccaggtcgacccggtagcgctcgcgcagcaggttcaggcccatagcccacgcacctcggcccggttcagggccagccactgcagggcgatgatgctcgccgcgttgttgatccgcccgtcgcgcacggcctgcagcgcatcttccaacggccagacgtggacgcggatgtcctcgccctcctccggcaagccatgcacgccgccgacgccttcgctgtcgcaacggccgacgaacaggtgcaccacttcgtcggtgccgcccggcgacggcaggtactgggttatcggccagagcgcaccaagagtcagcccggcctcctccatcgcctcgcgatgggccacttcctccggttgctcgtccttgtcgatcaggccggcgaccagctccagcagccaggggttggcgagcttctgcatcgccccgacgcggaattgctcgatgagcaccacgcaatcgcgctgcgggtcgtagggcagcacgcagaccgcgtcatggcggacgaacagttcccgactgatttcccggcccatgctgccgtcgaactggcgatgccgcaggcgcaggcgatcgagacgatagaagccgcggaagcattcctcgcgctgcacgagctcgacgtcaccgggggcgggtttgaaggtttcggacatcctcgactcacttcactcgggtatgtgggtttcgcgccatcctatcgcggcccggcgcagggcgcagccactttcaggacagctcgggaaaacttcgtggcgctcgccgcacgggcgtgtttcccggccacggctaggccatacttggggtttgcgcgggccgaactcaagcgcgacgccagggtcgaaacggactggtcgacgcttcgagcccgcccatccaccgtcgcaaaaggaatcccatgcgccttctgaaattcgccgccctcggcagcctggtcgttctgctgagcgcctgccagagcctcttcaagcccggcctcgacgacccgctgcccaccgagcgcctcgccagcgagcacctgaagcccggctgtcagggcgaacagtgtcccttggtaaacatcgacaccttgaagttccccgacgaaccgcagttggacccgatcgtcgagcgcgccctgctggaaatgacccgggaaaacaacgaaacgcccctgccggcatcgctggcggcctacgagcggcagttcctggacagcgccgagccgggctggagcagctacctgcaagccaaggtgcgcgaacaacatgacggtctggtgatcatcgagctttccagctacctgttcaccggcggcgcccacggcatgcccggtcgcggcttcatcaactacgaccgcaggcagcacaaggtgctgagcctgcaggacatgctggttcccggccaggaagaagccttctggaaacaggccgagctggcgcacaaggcctggctgctggccaacaagctcgaccaggacgccgatttccagaagacctggccgttccagcgcaccccgcacgtggcattgaccttcggcgcggtgacgctgaagtacgacgcctactccatcgcgccgtattcctatgcccaccccgaactgaagatcccgtatccgcgcctgaacggcatcgtcaagccgaacctgttccccggccgcggctgacgcttccgacgctctgcagcccctcgtcacggcgaggggccccgtggcgcggcctagacctgcctgtagatcaccgatccttcgtccttgaagcgcgccgcctgctcctggaagccggcctcgatggccttgctctcgtcggacaggccgttctccttggcgtagtcgcgaacctcctgggtgatcttcatcgagcagaacttcggtccgcacatggagcagaagtgcgcgaccttggccgagtccttcggcagggtctcgtcatggaacgcccgcgcggtgtccgggtccaggccaaggttgaactggtcctcccaacggaactcgaagcgcgccttggacagcgcgttgtcgcggatctgcgcgcccgggtggcccttggcgaggtcggcggcatgggcggcgatcttgtaggtgatgatcccggtcttcacatcatccttgttcggcagacccaggtgctccttgggcgtgacgtaacagagcatggcgcagccgaaccagccgatcatcgccgcgccgatgccggaggtgatgtggtcgtagccgggggcgatgtcggtggtcagcgggccgagggtgtagaacggcgcctcgtcacagcactccagctgcttgtccatgttttccttgatcaattgcatcggcacgtggccgggaccttcgatcatcacctgcacgtcgtgcttccaggcgatcttggtcagctcaccgagggtttccagctcgccgaactgggcggcgtcgttggcgtcggccaccgagcccggacgcaggccatcgcccagcgagaagctgacgtcgtaggccttcatgatttcgcagatctcttcgaaatgcgtgtagaggaagttctcctggtggtgcgccaggcaccacttggccatgatcgagccgccgcgggaaacgatgccggtgacccgcttggcggtcagcggcacatagcgcagcagcacgccggcgtggatggtgaagtagtcgacgccctgctcggcctgttcgatcagggtgtcgcggaagatttcccaggtcaggtcctcggcgacgccgttgaccttctccagcgcctggtagatcggtacggtgccgatcggtaccgggctgttgcgcaggatccactcgcgggtttcatggatgtgcttgccggtggacaggtccatcaccgtgtcggcgccccagcggatgccccaggtgagcttctccacctcttcctcgatcgacgagcccagcgcgctgttgccgatgttgccgttgatcttcaccaggaaattgcggccgatgatcatcggctcaagctcggtgtggttgatgttcgccggaatgatcgcgcggccgcgggcgacttcctcgcggacgaactcgggggtgatttccttcgggatgttggcgccgaagctgtgccccgggtgctgctggtcgagcaggccggcggcccgggcttcctgcagcttcatgttctcgcggatggcgatgtattccatctccggggtgatgatgcctttcttcgcgtagtgcatctgcgagacgttggcgcccggcttggcccggcgcggcgtgcgcacgtgggcgaagcgcagggcgtcgaggctggcgtcggccaggcgggcctggccgaactcggaggtcaggcctgggaggatctcggtgtcgccgcgctcgtcgatccagcgcgaacgcacgtcaggcaggcccttgcgcagatcgatgcggacctcggggtcggtatacgggccggaggtgtcgtagacgaacaccggcgggttcttttcgccgccgaaggcggtgggggtgtcggcgagggagatttcccgcaccgggacgcggatgtccgggcgcgagccggtcaggtagaccttgcgcgagttcgggaaaggctgcgtcgactggcggtcgagctgctcaaggcgggtgatgttgttcttctgcgttgcgctcatcgatggctctcctgggtgattgtcgggagaacctggcacgcggggccaccgggactggtggcgagaaggacgcgccggcaaggcaggcatggcgcggacatcttgttccctacgcgggttgctgcggtccgcgcgaggcggaaccggacgctagcccgatcaggttcaacgggatccggaactatccgatctcagcccctcgtatagggcaccccgacaagaaccccggcagtctaatcaacaccggcgggatacgccaacgggaaaacgccccgcccgaccggcagtcatggtccggtccggcgccctctcgccagggaagacgcagatccccgcacgttcgccggcacatcgatccggactggctcttcgatcagttgccgcgcaggtgccttgaccgccaccggtagcgaccttagccttgccccacctcgcatcttttccaggacgaacgaatgctgcgcagactctccctggcggccgccgtggccgctgctaccggtgtcgcctgggccgcccagccgaccccgctgccgaccaagaccgacctgatcagcgtctacaaggaagccgtcgacaacaacgccgacctcgccgccgcccaggccgactacctggcgcgcaaggaagtggtgccccaggcccgcgccggcctgctgccgcaactcggcgccggcgcccgcgtcggagacacccggatcgcattcgacgagcgtccggcgaccgtcaagcgcaacagccaggtcgtccaggccaccctcagccagccgttgttccgcgccgaccgctggttccagtggcaggccgccaaggaaaccagcgaccaggcccggctggaattctccgcgacccagcaggacctgatcctgcgcagcgccgagacctacttcacggtgctccgcgcccaggacaacctggccaccagcaaggccgaggaagccgccttcaagcgccagctggaccaggccaacgagcgcttcgacgtgggcctttccgacaagaccgacgtgctcgaggcccaggccagctacgacaccgcccgcgccaaccggttgatcgccgaacagcgcgtggacgatgccttccaggccctggtgaccctgaccaaccgcgactacagcgccatcgagggcatgcgccacaccctgccggtggtgccgccggcgccgaacgacgccaaggcctgggtcgacaccgcggtgcagcagaacctgcgcctgctggccagcaactacgcggtcaacgccgccgaggaaaccctccgccagcgcaaggccgggcacctgccgaccctcgatgccgtggcccagtaccagaagggcgacaacgacgccctcggcttcgccaacagcgccgccaatccgctggtgcactatggcaagtatgtcgacgagcgcagcattggcctggaactgaacatcccgatctacagcggcggcctgacctcctcccaggtccgcgagtcctaccagcgcctcaaccagagcgagcaatcccgcgaaggccagcgccgccaggtggtgcaggacacccgcaacctgcaccgcgcggtgaataccgacgtcgagcaggtccaggcgcggcgccaggcgatcatctccaaccagagttcgctggaagccaccgagatcggctaccaggtcggcacccgcaacatcgtcgacgtgctcaacgcccagcgccagctgtacgccgccgtgcgcgactacaacaacagccgctacgactacatcctcgataccctgcgcctgaagcaggcggccggcaccctcagcccggccgacctggaggcgctcagcgcctacctgaagcaggattacgatccggacaaggacttcctcccgccggacctggccaaggccgccgccgagcagttacagagcaagccgcgccagcagtactagcacgagccaagacgcccccggtcgggggcgtcttcgcttgactggcctggcgcgcgtcgcccgggtcagcgcgccagcggctggagcagcgcgtcgaactgctccagccgcgggaaccgcaggggtacatcctgctcgagattttccagccgcgcccggtaggcgcgcaggaagttgccgcgcgcttcctcgctgatgtatggcacgtgccaggcgacgaagggctccagcacctgcatgccgacataggccagggtgccgcgcaggatcggccgcagcatgtcctccagcggtccgtggatggcaccctcgccgaacatgtgcgggcgcccgcccagggtcaggctgaccagcgccttcttgccggccaggccaccctggtcgtagaagcgcttgccgccatagcagaccccggacaccagtacccggtcgaaccaccccttgaggatcgccggcaccgagaaccagtagatcggaaagttgaggatcagcaggtcggcccacagcagcttgtccagctcggcctggatgtcggcggccaggctctggcgcttgacgctctcgcgctgctccagggcgtacaccaggtagtcgggatcggcgcgctcggcgaagtcggcggcactggccaccggattccagttcatcgcgtagagatccgagacctgcaccgcgtggccctggcctgccagggtctcgcatgcctggtcacagagcgcgcgggtgaaggattgcggttcgttgtgggcgtggacgatcagtacgttcatcgtggtttccgaatcgtggtgaccggccgcatcgctcgcggccgaggggttcaggcctggccgagcaactcggcggcgcacagcgcgatgcgccgacaggcttcgcgcagcggttcggcgcccaacaccaggccgaggcggatgtgaccggcggcgctcgggccgaaggcttcgccggcgagcaccgatacgccatggcggtccagcaggcggtcggcgaaggcctgggcggaaagtccggtgggacggatgtcgaccatcacgaacatgccgccgtccgggcgcagtggacgcaggccggggctgtcggccaggcactcgattaccaggtcgcggcggcggcggtaggcctcgcgcatcgcctccaactccggcagcggcgcttccagcgcggtgcaggcggcatcctggatgaattccggcgagccatagagcatgcacagggcgaggttctccaggtgcgcgcagagtgctgcgggaccgaccacccagccgacccgccagccggtcatggcgtgggatttcgacaggctgttgagggtcgcggtacggtcggccatccccggcaggctggccgggctgacatgctcgccgtcgaacagcagttcgctgtagacctcgtcggagatcatccacaggtcatgggccatgcacagctcggccagggcttcccaggtggcccgcggcaggctggcgccggacgggttgtgcgggctgttcagcgccatcgcgcgcgtgcgcggggtgatcagtgcggcgacctcctcggcctgcacgcggaagccattctcggagcgcaccggcaccggcaccacccgcgcgccacaggcgccgaacaccgcttcgtaggtaacgtacatcggctcggcgactatcacctcgtcgcccggattcagcaggcactgcaccaccgcgtacagcgcgcactgggcgcctgccagcaccaccacctgctccgcgtccaccgcctggccgctgcgccgccggtggcgctcggcgatgcgctggcgcagggcgcgcttgccgcgcacgtcggcgtagtgggtgttgccggccagcaggctgtcgatggccgcctggacgatgggcgccggggtatcgaagtcggggtcgccgaccgacagcaggaggatttcctcgccctgctcgacccgcgccagcgcgcgatagtggatgtcccaggcagcggcgccgtcgccggcgatacgctgagtgaagtcggaatagcgcatggatgctctccttgtccggcggtcagcgcgcgcaggcgtgccgcagttcgatcagggtcacgccgggctgcccgaagccggcgcgcaggtcgcgctccagttcgtccaggtcctgcggctggcgcaccgcgcaaccgtaggcgcggcccagcagggcgaagtcggggttgcgcggcagcacgccgaccggctcgatgtccaggccgagcatgtcgtcgcggatctggccgagcgcgtcgttgttccacagtagcaccaccagcggactgtccagttcctcgctggcggtggccagttcctgcgcggtgtagaggaagccgccatcgccgaccagcaccaggcccgggcgctgcggggcgccgagcttggcgccgatgccggccggcaggccgtagccgagggtgccgtagccggtgggatgcagccagctgcgcggcgctcggctggcgaacgcgtagttgccggtataggccagttgggtcatgtcggtgctgacgaaagcatcggccggcagcgcggcggcgatccggtcgaggatcgcctggtgcagcgcctgcagcggcgcgtgtgccgcgcggatctccgcgcgcaggcgcgccaccctcgcggcggccggcgcggcgtcgcgggcctcctgcggcaggcgcgccagcagcgcctcaagggtctgccgggcatcgcccctgagcgctacggcagagggatagaagtcgttgaacttgcgcgggtcgatatcgacgcggatcagttcgccggacagcggcaggcgttcgcgccagaagtcggtgtcggccatctcggtgcccaccgccagcaccaggtcggcctcggcgatcatctcccagcccggcgctacgcacaggctggccccggcgttgagcggcgcgtccggcggcagcaggcccttgccggcgacgctggtgaacagcggcgcggccaggcgctcgctcagcgcggcaagcgcatcgccggccgccagcgcgccgccgccggcgatgagcattggtcgccgggccgcagccaggcgctccgccgccgcccgcaatgcctcggtgcacggcacaccacgaccagggcggcgcgccacggcagcgctccagtcatgggccaccggcgcggcaagcacgtcgagcgggatcgagatatgcaccgggcgcggacgctcgctgtcgaacaccgcgtaggcccgggcgatcagttcgggcagctgttccgggctcaaggccagggcggagaaggcagtgatcggcgcggtcatggcacgctggtcctgggtctcgtgcaggcagccccagcccttgcccaggctggcgctgtggttgacgctggaaatcaccagcagcggcaccgagtcggcgtaggcctggccgatggcggtggcgacgttggtcacgcccggcccggtgatgacgaagcacactcccggcttgccgctgacccgcgcataaccgtcggccatgaagccggcgccctgctcgtggcgggtcagcacgtggcggatgccgctgcccggaagtccgcggtacagctccagggtatgcacgccggggatgccgaaaacggtatccacgccgtagttggccagcaagcggaccagggcctggccggcggtgagggtcttctgtggttgcatgggcaatatcctcgtccagttcggcgaccatcggagtcgccgttcgcgccgcagcgctcttgctcccattcccacaagcgggagggggagccgtcgtgtccccccggccttcagccattggccagccggatcaacgcatccaccgccagcgctccctcggcatccgccagcaacggattgacgtccagctccagcaagcgctcggcatgttcgcaggcgaattcggcgaccgcgcggatcgccgccaccagggcctccatgcacactgccgggcgaccgcggaagccgctgagcaacggcgcgctgcgcaggctcagcagggcatcgcggatcgccgcgtcggtggttggcaggagcaggctgcgactgtcgcgcagcagctccacgagtatcccgccggcaccgatcaccaatgccaggccgaagccctcctcgcgcttgaccccgacgatcagctcggccagcggcgcgccagccatgcgctccaataaaacacgctcgaagaccagttgcggcgcgtgccgggccaggctttcgcgcatgtcgaacaatgccgcctccaacgccgcctcgttgcgtaggccgagcgccacgccaccggcctcggtcttgtgcggcagtgcggcgctgaccgccttgagcaccagcgggaagccgaggtcgagggccgcttcgcgggcctggccgggggtgctcagcaccccctggggcagtggcaggccgaagggtttcagcgcctgcttggattgccactcgtcgagcaggtagccgtcgcccgccagcggccctgggcagatcggcaccaacgccgcctcaccgcgctccagcagcgccgcgcggcgctggcggtagcgggcgatccgtccccaggcggcgagaccatcctcgacgccctgcagcgcggcgacgccctcgccgtgcaacagctcgcgggcccgggccggcagcagttccgggaacgccgaggcgatgaagccgactttgccgtggcgcttcagcgcggcgcagtagcgttgcagaagcaggtcgcactgcggccgctcgccggtttcctcgcccggatagtcgagcaccagcagggcggcgtcggcagggctgcgcagagcgctgtcgagcatttcctccagggccgcggcatcgccccagatggcggtggtgaagtccagcgggttggcgatgttggcgtagtcgggcagcaccccggccagttcgtcgcgctgtccggcgtcgaaagacggcaaccccaggccgttgcgctcggcgtaatcggcgatcaacccggcgtcgccgccggaacaggccagcgcgaccaggctcggcccgccaggcaggtggccgcaggcggcggccttgagggtttcgacgaagctcaccgggccgctcacgcggatcaccccgaggcgctcgaacaggctgtcgtagagcgcgtcggaaccggccagggaactggtgtggctgagcgcgagggccgcgccgatcttcgacaccccggtcttcagggcgatcaccggcacgcctttctgcaacgccttgtaggccgcgcgggcgaaccccgggacgttcttcagcccttccagatgcaggccgatggcagtcacccgcggctcgtcgagcagcacgtccatcagctcggcgatgcccagctgcgcctggttgcccaccgatgccatataggccaccggcagcgaacggtcgctcatcgacaggttgtaggcgaagttgccactctgcgtcagcaccgcgacgccccgctccacctgccgaccgccatgtgccaccggccatagcgcggcgccgtgcaggtagtcgagcaagccgtagcagttcgggccgagcagcgccatttcgccggcggcggccagcagccggcgttgcacggccaggccctgttcgccggtttcggcgaagccggaggcatagcagatcgccccgccggcgcctttggcggcgagcgcggcgaccgcgtcgagggtcagttcgcggttggtggcgacgaacgccgcgtccgggccgcacggcaggtcggcgacgctggccacgcaaggtacgccttcgagttcggcgtgctgcggattgaccagccacaactggccggcgaaaccgccttcggcacagcgtttcagggtacgcgccatgccacggccgccaatgaaggcgagatgcctgggtgccagcaggcgcttgaggttttcacgattcatgtcggttctcgattcggaacatggcagccttcccctctcccctggaggaagaggggagccaggacttcaacgcagcaacggccgcagcagttcgcgggaaacgatgtgccgctggatttccgaagtgccctcccagatccgttcgatccgcgcgttgcgccagatgcgctcgaccggtccttcatccatcaggcccatgccgccgaagatctgcaccgcttcgtcggcgaccttgccgagggtctcgctggcgaacagcttggccatgccggcctcgccgtcggtcatggtgccctggtccatcttccaggcggtgtgcagggtcatcagctcggcggcacggatctgcgtggccatgtcggcgagcttgaaggaaacgccctggtagctgccgatcggctggccgaactgcttgcgatcggccgcccagcgcagcgacaggtcgagggcgcgctgggcctggccgacgcagttggcggcgaccatcacccgtccggcggtgagccaggcgttggccacttcccagcccttgccgacctcgccgagcaccttggaggccggcacccggcaatcgtcgaagaagatctcgtaggtgtggtagccacggttgctcacgcatttcggcccgcggcgcacggtcatcccgggcgtgcccttgtccaccaggaaggcggtcaccgcgttgcgcttgcggccgttgtgctcgtagctgtcggtgacggcgaagacgatggcgaagtcggcgtgcccggcgtggctgatgaagtgcttgctaccgttgatcacgaaggcgtcgccgtcgcgcaccgcgcgtgtcttgatcgaattggcgtcggagccggcgcccggctcggtgagggcgaagcaatcggtcttttcgccctgcacgcagggcaacaggtagtcgccgagctgttctccggtgcaggccatgaggatcttcgagggccgcgcgacgaatacgtggagggcccaggagaccttcgacagctcgcgttcgaccagcgcctgggacaggtagtcgaggccgccgccacccacctcctcgggcatgttgaaggcatagaaaccggcggcgagggccttgccgcgaatctgtgcggccagctccggcgacaccgcgtcggcgcggtcgacatcgtcctcgtggggcagcagttccttctcgacgaagctgcgtaccgcctcgaccagcatgtcctgttcctgggtcagcctgaaatccatgggaatcacctgctcggcgcctagcgcccgctgaattgaggggaacgtttctcggccacggcgcgcagcgcctcggcggcatcctcgctgcgcccgcagagcagcccggcggcctgctcggcacgcaactgctcggccagcgagcgcccggcgccgtcgcgcagcaggcgcttggtctgggcgaaggcgaaggtcgggccgctggcgagacgcgcagcgaaggcgccgaccgtctcaaccaggcgctcgtcggcgaccacctcgccgaccagtccggcgcccagggcgcgctccgcgctccaggcttcgtcgaggaacagcaggcgcttggccgcctcgctgccaagcagccgtggcagatgccaactggcgccggcgtccgggcagtaggccatgccggtatagccggccttgaagcgcgccgaggcggcggcgatgcggaaatcgcagcacagcgccaggtccatgccagcgcccacggcgctgccgttgacggcggcgactgtgggtttgtcgagggcgtgcaggcgccccatcagggcgtgggcggcctcggtccagccatagctttccagctcgccacgggcttcagccgccgcccattcggcgagatcggccccggcgcagaagctgcgtccgctgccgccgaggaccacggcgcgcactgccgggtcgcgctcgcaggcatcgagtcggacgtgcagggcctccagggtggggatatccagtgcattgcgctgttgcggacgattcaggacgagccaggcgatcccggcttcgacccgcgtctgcaatggggaaaggtcagtcatgcggccctcgttcttattgttggttgatggcgatcgcggctttcaggcaatactaaacactcgttcaacaagaccacaatccacccattcgggtgtatgtaacggccctgcggcaggcgcaaagccacacgccatgcgatccgccgaaaagcggcgaaggcccgcgcgagccggctgttacaacttcgaacaaaccaaccaggcgaaaacgaaaacgcccgccggatgcggcgggcgtcgggtcctgcgaatggccgttcagccggcccgtcccagggcggggtcgcccagtccctgcggctgccggcgacgaaccacgtaataggccaggtagcaggcggcgatgaagccgaagccccagtacaaggacggccgctgggtgggatcgagggcgaggaagacgaacagcgagcagcacacggcgatgcaggccagcggcaccagcgggaacagcggcgcggcatatttcagctcggcgaccgtgccgccgctggccatgtactcgcggcggaagcggtattgggcgtaggcgatgacgatccaggtgacggtgccggacatcccgctcactgccatcagcaccatgaacagggtgtcggcggcgaccacgctggtcagcaacgagagcagggcgaagcacagggtgatcagcaacgcgtagagcggcacgccgcgcgcgctgagcttcgacaggccgcgcggggccatgccggtcctggacatcgcccagaggatccgcgtcgaggcgtacaggcccgagttgcctaccgagaggatggcggtgaggatgacgaagttcatcaggtccgccgcgtagggaatcccgaccatgtcgaacacctgcacgaacgggctttccatcagcccggcctgttgccagggaatgatggcggaaagcacgacgatggccagcacgtagaagatcagtacgcggaacaccacgttgcgcaccgcccgcgggatgctcttctccggtcgctcggtctcgccggcggcgacgcccatgatctcgcaaccctggaaggcatagaccaccgtcatcatcaccgcgaacaccgccgacaggccgttggggaacagccgctcgccgaccaggttggagaacatcggcgccggcgcaccgctcttcagttcgataccgccgaagatcaccagccccccgaccacgatgaacaccaggatcgccgccaccttgatcccggcgaaccagtactcggcctcgccgaaggcgcgggtcgccagggcattgagggagaacagcacgaccacgaagaaacccgaccatagccacacgggcacctccgggaaccagcgggtcatgagcatcccggccgcggtgaattccaggcctaccgtggaggcccagctcatccagtagacccagccgatcatgaagccagtcgccgggccgatgaaacgcgtcgcgtgggcctggaacgaaccggagaccggcatctgcaccgacagctcgccgaggcagaccatcaccaggtacatcagcaccccggccaccaggtaggccagcaccgcgccggccgggccgccctggttgatggtcacgccggagcccatgaacagcccggtgccgatcaccccgccgagggacagcatgaagatgtggcggctcgccagggcccgggtgagttgcagcctttccttgccgtcagccatggcgcacctccggatgagggtacgcacaggggtcttcgagatggctcattattcttgtctccactctgtcagaggccgtgtcttgcgcacggatgagcggattattggcggcggatgtaagacgccgttgaacgcgcggatcgaagatgtaaaaagctgtaaggaagttgttcgccgcgccgctcaaccggccgctgagtcggcttcgccgaggaagccggcgcggcgcagggcttcggcgccgtcgcggcgcaggctacccaggcgtgcgccccaggcccgcgggtcgaccccggccgcgcccagggcctcgcgctccagctcgcccaggccggcgccgagcgccaccaggcccatggagtggcagcttccggacaggcgatgggcgatgttcgccgcctcggccaggtccgcctggtccagggcttcggccagcagcggcaactgctcgtccaggcttcccagcaggttgcccagcagtccggcgagcttgtgccgccccagcaggcggcggtgggtctcgagcatttgccggtccagcgcggcgtccaccgcaagcgcaggcacgccggtgccgacctcgcccagcgcgcggcgcagctcgtccatccgcaggggcttgccgagcaccccctgcatgcccgcggcgaagtaccgacgcaccatgtccggctggatgctggcggtgaaggcgaagatcggcgtggcgcggttcaggccgtcgagctgccggcgaatcccggcgcaaagctcgaggccagccatccccggcaggtgcatgtccagcaggatcaggtcgaagcgccgctgccggcacaacgccagggccggccccgcgtcctcggccagcatcacccggtggccgtcccgctcgagcaggccctgggccacctcgcggttgagcgccacgtcctccaccagcagcacctccagcgcagacaccgatgccgccggcggcgtcgcgccggacaagctcgccagcgccagctcgatctcgaaccagaacgtgctgccctggccgacccggctttccacgccgatccgcccgcccagcgcttccaccagccgcttgctgatcgccaggcccaggccggttccgccgtaacggcgggtcacggcgtcgccgccctgggtgaagcgttcgaagatgcgttcgcgcatttcctcgggaatgccgattccatcgtccgcgacgctcagccgcagtcgctcgcttcctgcgctgcgcaccagccgctcgacgcgaacgcgcacctcgccggcctcggtgaacttcaccgcgttgcccagcaggttggtcaacacctggcgcaggaactgctcggcgccgcgatggccgtcatgaacctgcgggtccagccacaggtccagccgcgtggcgttctcccgcgcccgcggttcgagcagggtgaggacgtcctcgagcaggcttcgcaaggaaaagtccaccgcttccggcacatccggcgcttcctccagccgggcgaagtggaggacctcgttgaggatcgccagcagtccctcccccgctgtcgccagtgcccgcaggcgctggcggtcacgctcgccgagcgatgcctcgcgcagcagctcggccatgcccaggatgccgttcagcggggtacggatctcatggctcatggtcgcgaggaaacggctcttcgcccggtcggcggcttccgcctggtccttcgcccgacgcaggctggcggtgcgtcgctcgacctgtcggcgcaactcgtcgcgatcggcatcgcgccggcggcggtcggtgcgcagggcctggcgcatgtcttccagggcggcggcgacggcgtcgatctcatcgcgctcgcggtccaccttgtccagtcgcagcggctgttgcaggtcgccttcggcgatatgcccggcgaactcggacatgcgccacagatggcgagtgaccaggctgtggaacagccaactgagggccaccgccaggccgcaaaggaaactgcccatccacaagaggctggccaggccgccggaaaccagccggcgatagaccgccgccaggtcgatggcgatctccagctcgcccagttgccgacgctcgccccccggcggctggtagctcaagggaaagcgctcgacccgcagcatgccgcgtggacgctggtcgccctgcaacaggttgaagtcggcgctttgcaggctgacacgggcgatgtcggggaaatccccgaggccgcgcaactgcacgttcaactgctcctggttgagatcccacaggctgcgctcgaagctggccaggtagccgctgcggatcagttccaggcgcgcctcgatctcgcgcatttcgcggcggtattcgaagaacagctgcacggcgccggcgaggacggtgaaacacaggctgaacagcaacacccgccacagcaggcgccgcgccaacactccgccgtggccgctcaccaggcgtccgcgcggttgccggcaaggcgccgatagtcgcgcacgctgtcgtccagccaacgctggatgctgccgtcgtcgcgatagccacgcagggcccggtcgatctcgtccatcttcgccgccagcggcgagtgccgcgagaccgccacccgcaggtagtccaccgtcagcggttcgggcagcgcacggatgttctcgccgccggccaggcgctcggcgaacagcgtgccggtgcgccgttcgtgggcgatgtagtcgatgcgctggcgcaccagcttgccgaagttctgtcggctgtcggaaacccattcgacgttgccgtggcggccgacgaagcggtcgaagtccgccccgtagctttcgccgaacaacagcccgccgcgatagccggcgaggtcgccgagggattggatgcgcaccggccgctggcggttgtagaagatcgccacgtcctcgcgcagcaccggctcggcggaaaacgccaggtcgcgatcgcgcgcgggcgtgcggtaggccagtatcaggtcgacccgtccggcggcggcgtcgagcaggcagcgccgccagttgcccagcaccaccacctcgacccggtagcccagcgcgccgaacagccgcttcaccagctccggcgccagcccccggacctgctggccgtcgctccaggagatcggcgggtataccggatagtcgcaatagcggatggtctccgcagcctgtgccaggccgcccagcagccatccgcagagcgccagccagcaggcctgcatggctcaggcgtcgctggccgcggcggtgaacaggtagccggcgccgtggatggtgatgatcagttgcggttcggccgggtcgtcgcgcagcttgcgacgcaggcggccgaccagcacgtcgatggagcgatcgctgggcagccactcgcggttgcggatctggtccatcaactggtcgcggctcagggtatgcctgctgttgcgcaggaaagcgccgagcagttggaattcgccatgggtgagcagggtttcgttgcccgcgtggtcgatcaggcggcgccggtcggcgtccagcagccagtcgccgaactgcctgagggcctgccgggcggggccggcgctggcctgggcatggcgcacccggcggatcaggttcttcgcccgcgacaccagttcgcgcgggttcagcggcttgatcacgtaatcgtcggcgccgcactccaggccgacgatgcgatcgatctcgtcgttgcgcccggtgatcaggatgatccccacttcggagcgcacccgcagctcgcgggtcagggtcaggccgtccttgccgggcaggcggatgtccagcagcaccagctcgaccggctggccgagatgggcgcactcggcaaggcaggcttccgcctgctcggcgttgccggcgcagaggacgtcatagccctcctcgccgagataggcctggagaagctcacgaatcaccgggtcgtcgtcgaccaccaatacgcgcggaaccatcgccatcaccttgcgcctccggcgggccggggcgtttcttgttctgggttgtcggacggtgggcggaaggggccggggcgccttccgctgccagcagcagcctatccactactgaacggacgatcaacaagcttccatcgcacgccggaagcggcgatgagcgcccgcctccaggccatccacccaggcctcgcaaatctgcacgccctgccgcggcgtgaaggtcgcgggattcagcccagactccagccacagcccgtcgagcagggcgctgaggctgatggccgccagttccgcgtcgaagtccgcccagccgccctcctccgccagttgccgcagcacgccgaccagcagcgcccggtactcgccataggaatggtcgtggacccgcccgatcgcttcgatgctgcccaccgcaccccagaacgccagccaggcgtcgagcaattgcggatcgagcagctcggcggagaaggatgcctcgaagaacgccgagagccgcgggcgggcgccgcccggcgcggtgtcgatggcaccgcggagcaggcgcatgacgcgtccggtgaccgccaggtaggcctcggccaccagcgcgtccttgccatcgtagtggtgattgatcaggcccaccgataccccggcctcggcgcagatcttgcgcaccgaggcgccctggaagccatgccgcttcaggcaggccagggtcgcctcgatcagcagcgccttgcgctgctctggctccagacgggaaaagcgcacttcctggttcatcctttcgcggctcctgctcgtcgcccgcgaccaccggcgggcagccccgatgatcgcaggttacgtagcgcccgtctcactggctggcccaggcgttgaagcgctcctccagctcctcgccgtgctcgacccagaattcgtcgtccatcgccaggccctgctccaggttcgccggcgcggtcggcacccagctcgccagttgcgcgggcaggcgctgggcggcctggcggttggtcggcccgtagggaatgttctcgacgtagcgcacctgggcatccggggcattggcgaaggcgatgaagcgacgcgcctcggcgccgcgcttcgaacccttgaccaccgcccagtagtccatgccgtacaggctgcccggccataccagggccaggttgcgccccgcgcggtgggcgtcggcgatgcgcccggtgtaggtggacgtcatcaccacgtcgccggcggccagccactgcgccggctgcgctcccgcctcccaccactggatgtagggcttgagctggcccagcttggcgaaggcacggtcggcaccggcgcgggtcgccagcagcggatagacctgctcgcgtggcacgccgtcggcgagcagggcgaactccaggttgtagatcgcccgcttgcgcaggccgcgcttgccggggaagcgctggacgtcccagaagtcggcccaggacgccggcggctgttgcagccggtcggcgtcgtagccgatcgccacgccccagaccagcgcggcggaaccgcattcctgggcggcattggcgatcaactgctgcttgccgccgatggcctgccagtccagacgctcgaacaggccgtcgtcgcaaccgcgcgccaggtccggcccctcgacctggaccaggtcccagtcggcgtgaccggtgtcggccatcaccttgatccgggccatctcgccgttgtactcgctctgcaccacgggaatcccggtctgctgcgtgaagggctggaagaacgccacctcctgggccttctgtccggcgccgccgtagccgaccaccaccaggccatcatcggcctggaccggcgcgaggccgccgaacgccagcaggacggcgccgagcaggacgcggcaaggaaaaaccgggtgcggacgggcgctggccgcgcggcgcaacggaaaggaacggttcatgtgcgtctcctcttgttcttgttgtggagtggatcgcagcgagccgccgggaagcggccacgggacagaaactatccagtcgattttaaaaaaacaagttgattttttactgatggtaaattcatatcctgtttctgaagcgcgccgcgagaacaacaagaaggacgccaaccgtgaatttcccgcacctgttcagccccctggaaatccggggcaaacgcctgaaaaaccgcatcatgtcgagcggccacgacacgtcgatgcctaccgacaacctggtcaacgagccactcgtcgcctatcaccgcgcccgggcccgcggcggcgccggactgatcgtcatgcaggtggcgggggtccacgacagcgcgcgctacacctcgcacgtgctgatggccaccgacgatgcctgcatccccggctaccggcgggttgccgaggcctgccacgccgaaggctgtgtggtgctgtcgcagatcttccatcccgggcgcgagatcatggagtccgccgacggcctgctggcggtggcctattccgcctcggcctcgcccaacgaacggttccgggtgatgccgcgcgaactcgaccagccgctgatcgacgagatcgtcgccggctacgccgccgccgcgcgccgcctgcaccaggcaggactggacggggtggaggtggtcgccagccacggctacctgccggcgcaattcctcaacccgcgggtgaaccgccgcacggatggctacaacggcgacctcgatgcccgcctgcgtttcctccgcgaagtgctggcggcggtgcgcgcggccacctccgaggacttcatcgtcggcctgcgcctgtccgccgacgagcgcgaccccgagggtctcagcgaaagcgagtcgctgcaggcggccgaggcggtccagggcgagctggactacctgcacatcgtcgccggcacttcggcctccctcggcggcgccatccatatcgtcccgccgatggccatcgagccggcctacctggcccgcgaagccggtaccttcaaggcgcgcctggcgatcccgctgttcgtcaccgggcgcatcaaccagccccaggaggccgaggccatcctcgcccgaggccaggccgacgtctgcggcatgacccgcgcgctgatctgcgacccgcagatgccgaacaaggccgaggccgggcgcagcgacgacgtgcgcgcctgcatcgcctgcaaccaggcctgcatcggacatttccaccgaggctatccgatctcctgcatccagcacccggaaaccggccgcgagctgacctacgcaacgcccaatccggcctcgcggcgcaagcgcgtgctggtcgccggcggcggcccggcggggatgaaggcggcggcggtggcggcacagcgcggacacgaggtagtgctctgcgaggccggcgcccagctcggcggccaggtcaacctggcgcaactgctgccgcgccgcgcggaattcggcggcgcctccaccaacctgcaacgggagatgcaactggccggcgtcgaggtacgccgcaacacgccggtcgaccgcgcgctggtggagcgcgaacggccggacctggtgatcgtcgctaccggcgccgaaccctattggccgcctttcgagcgcggcggcgagctgcaggtggtggatgcctggcaggtgctgcgcggcgaggtgcgggtcggtcgttcggtgctggtcaccgactggcggggcgactggatcggccccggtatcgcggaaaagcttgtacgcgagggccaccaggtgcgcctggcggtgaacggcacccactgcggcgagagcctgccgctgtatgtgcgcgaccagttggccggcgagctgcaccgcctgggtatcccggtcacgccctacgcccgcctgtacggctgcgacgataccacggtgtacatgcagcacagcgccagcggcgaggcgatgctgttcgaggaggtcgataccctggtgctatgccagggccaccagccggtggaccgcctggccgacagcctgcacggcctggcggaggtgttgcggatcggcgactgcctggccccccgcaccgccgaggaggcgatctacgaagggctcaaggccgcctggagcatctgagcggcgcggccgcggctccctcgacgggtcccggcccagcccctagaatgccgcaaacgcagccaggaccccgccgcatgccccgcccgtcaccgccggacgccaccgacacgccgcgcagcgaaacgcacttcctcggcacccgcatccgcggcctgcgcaagcgccgcggcctgaccctggccgagctggccgcacagagcgaactcaccgccggctacatcagccagttggaacgcaacctggcgtatccgtcgattccggcgctgttcaacatcgcccgcagcctcggcgtgaccatccagtggttcttcgccagcgaggccgcggtggacccggcggacgccggctacgtggtgcggcgcaacacgcgcatgagcgtgcattacgaagacggcatcatcgacgaactgctcaccccgcagcccagccgccagttggagatcctccactcgcgtttcccgccgggcacctacagccagcagagctacagccatgagggcgaggaagccggctacatcctcagcggaatcttcgaactctgggtcggcgaccgccatttccagctccgcgagggcgacagcttcagctactccagccaggaaccgcatcgctacggcaacccgggcgacagcgataccctggtgctctgggtgatcaccccgccgacgttctgaaacgccctgtcgcgatgcagggccaggggagggccgacggggcgagcgctacccgccgcgcccgagcaaccgcgccaaccccgccagcagccgctccagggcgccctggttgttgcgcagcaccttctctccggcagtggccatggccgtcgcgacctccggctgcgcccacaggcgcgcgaggccgtcgcacagctcgccggcatccgtcacctcgagcagcgccccggcgtcgcgcaattgcgcggcgatgtcgaggaagttgaacaggtgcggaccggcgaacaccggcttgcccagggccgccggctccagcaggttgtgcccgccgttgggcaccaggctgccgccgacgaaagcgatgtcggccagggcatagaggaacagcagctcgcccatggtatcgccgagcagcacctgggtcgcgcgtgccaccggctcgccgccggagcgccggaccgtggcgaagccttcgcggcggcatagctcgtggacgccggcgaagcgttccggatggcgcggcaccaggatcagcaacgcgtcgggacgcgtttccagcaggcgccggtgggctgccaggacgatctcgtcctcgccggcatgggtgctggcggcgatccacagcggtcgcgccgtcgcgtcccattcctcgcgcagggcggcagcggccagcggcagctgcgggtcgatgcgcaggtcgaacttgatcgagccggtcacgctgacgcactcaggacgcgcgccgagacgacggaagcgctcggcctcggcctcggtctgcacggcgatccaggacagctcggcgagcatcggccgggtcagcccggcgaagcgcgcgtagccacgcgccgagcgctcggacaggcgcgcattggccagcgccaccgggatcccgcgcacggcgcaggcatggatatggttgggccacagctcggtttccatgatcaccgccaggcgcggccgcacccggtcgaggaagcgcgccgccgcccagggcaggtcgtagggcaggtagcagtgccggacctgctcgccgaacaatgcgcggatgcgctccgagccggtcggggtcatgcaggtgacggtgaccggcagctgcggatggcgctccagcagcgcccgcaccatcggcgcggcggcgatgctctcgcccaccgagacggcgtgcacccagatgccgccgggcggcacctcgggcaaggacagggaaaaacgctcgccgatgcgcttggcataggccggtgcctggcgcgcgcgccaccacaggcgcaacgccaccagcggcaagccgaggtggaacagcagggtatagagggtacggttcatgggcgcgcagcttagcaaaactcccgccgaccggctcagccgatggcgcgcaggtggcgggtgaaggtttcgccgagccaggccgccgccgggccgagcacctcgttgcgccgccagaccagttcgaccaccagcgccggcggcgtccagtcgctggtcagctccaccatcagccggtcgtaggtggggtactgcaccacgtgccgcggtagccaggcccagccgaggttgcgcatcagcagctcggccatggaatagaagctgtccagccgccagacctgcgggctgatctgctcgccgcccggatagccgctctgctggggcacgatcaaaagttgccggtgctgtgccagctcgcggcgactgacccgttgcagcccggccagcgggtggccggcaccgcacaccgtgaccatctcgacgctgccgaggcgccgccgctccagcgactcaggcatgcgctcatggtggaacagcaggccgaggtcagcctgctcctcgagcaaacgacgggtgacgtcaccctggccgccgctggacacctgcacctccagactgggaaagcgctgcgccagcgcttccaggctgtccagcaccggctggtagggcatcgcctcgtcctgggccaggcgcagccgcggctcctcgccgcgcgccagccccagcgcgcgcccctgcaggcgctcgcactggcgcagcacctcgcgcgcctccgccagcagcacccggccctcgtcggtcaggcgcggctggcgtccgctgctgcgttcgaacagggtgacgccgaggtccgcctccagcagcgcgatgccgttgctcaccgccgattgcacccgcttcagttcgcgggcggcggcagagaacgactggcgctcggcgacgctgacgaacaggcggatctgctccaggttccactgcataacctatctccaataaagataggtaacgactttatcccatccgccggctccctagaatggccgcagtttccggaggaccccgccatgaccaactatctctacctcgccatcgccatcgccgccgaagtggtcgccaccacctcgctgaaagccgtcgccggattcagcaagccactgccgctgctgctggtggtgggcggctacgtgctcgccttcagcatgctcgtgctggtcatgcgcaccctgccggtcggcgtggtctacgccatctggtccgggctcggcatcgtcctggtcagcctggtggcgatgttcgtctacggccagcgcctggaccccgccgccctcctcggcatcggcctgatcatcgccggcgtgctggtgatccagttgttctcccgcgcttcggggcactgaacgaccgtcgcgggcgcaggttgtatactgcgccctttccgttcccgataaggcagccccatgccccaagccctttccaccgacatcctcatcgttggcggcggtatcgccggcctctggctgaacgcccgcttgcgccgggccggctacgccaccgtgctggtggaaagcgccagcctcggcggcggacagagcgtgaagtcgcaggggatcatccacggcggcgccaagtacgccctgcatggtgccctgaccggcgcctccgaagccatcgccgacatgccgcggcgctggcgcgcctgtctcggcagcgacggcgaactcgacctgcggggcgtgcgcctgctttccgaggcgcactacctgtggtcgccgggcggcctggccggcagccttaccagcttcttcgccagcaaggctgtgcgcagtcgggtcgagcaggccaagggcgaggatttgcctccggcgctgcgcgacaaggggttcaagggcaaggcctaccgcctcacggaaatcgtcttcgacgtccccgacctgattcgccgcctggcggaactggccggcgacagcctgctcgccggcgaacgcatcgaaccgctgcgcgaaggccgggaactggccggcctgtgcgtcgacggccgggagatccgtgcccagcgcgtggtgctcagtgccggtgccggcaacgaggcgctgctccgcgaactgggcctggaacaaccggccatgcagcggcggccgctgcacatggtgatggtcaaggcggcgaccctgaaaccgctgtacgcccactgcctgggggcaggaccgaagccacggatcaccgtgaccacccatccgacccgcgacggccagtcggtctggtacctcggcggcgacatcgccgaagccgatggcgtggcccgcgacgaagccgcgcagatcgccgaagcgcgtcgcgaactggcaaagctgctgccctggatcgacctcggccaggcgcagtgggccaccttgcgggtggatcgcgccgagccggcacagtccaacctgttgcgtccggacaacgccttcctcgccgaacagggacgcctgctggtcggctggccgaccaagctggcgctggcccctgacttcgccgaccgggtctgcgcccgcctggaagaagacggcatccgccccagcgaacatgccgcgctgccgcaactgccgcgtccgccgctcgccgaaccggcctgggaggtagccttcgcatgatcagggataccctccacgacctgcaccgcccgctgggcgacaccggcctggccgtttcgccgctgggcctgggcaccgtcaagttcggccgcgaccagggagtgaagtacccttccggcttcaccatccccgacgaccgcgaagccgccgacctgctggccctggcccgcgacctcggcatcaacctgatcgacaccgccccggcctacggccgcagcgaggaacgcctcggcccgctgctgcgcggccagcgcgaacattgggtgatcgtcagcaaggtcggcgaagagttcgtcgacggccagtcagtcttcgacttctccgccgcgcatacccggcgctccgtcgaacgcagcctgaagcgcctggagaccgagcggatcgagctggtgctggtgcattccgatggcaacgacctggatatcctcgagaacagcgaggtctacccgactctcgccgcgctcaagcgcgagggcctgatcggcgcctacggactctccggcaagaccgtcgaaggtggcctgcgcgccctgcgcgagggcgattgcgcgatggtcacctacaacctgaacgagcgcgccgagcgcccggtcatcgagtacgccgcggcccatgccaagggcatcctggtgaagaaggcgctggccagcgggcatgcctgcctgggcgccggacaggacccggtgcgtgccagcttcgaactggtcttcgaccagccgggcgtcgccgccgccatcgtcggcaccatcaatccgctgcacctggcccataatgtcgcgatggccgcgcaagccctgaaaaaggcctgaaccatacatcggctgcaacatccgcgggttgacacccgcggtgcattccgctgccatgttcctcccgaacgagccgtatcctgcctgccgccctcgcctccggtggccggtgcatcgaacgtgagcctccgtcccgccccggcgcgatgacccgacaaggagccccgtatgccccgtatgctcgcccgcaaggatccgtccgccttcaagaccctgccgctgctggtagaggcctccccggacgggctggtctaccaggccctcggcctgccgctgaacttccagcagatgctcgtacgccgccgccacatggaggtagccgacccgcagcgcttcgtcgccgagctggccaacctgggggtctcggtgcgcttgaccctgaactggcagggccgcgactactgggtgctggtccgtcagcgccggctggaccgcggcgataccgtgctcaagctgatctccggctacgtaccggcccacgaactgaacctgccgttgctcacggcgatccaggaagtcgccgaggaatgcctggtggagaccgccggcggctggctcggcgggcgcttcggcgacacctggctgccgacgccctaccagggttcgctgcgctaccgggagaacagccacttcgtcctcaccccgctgtccggcgccgcccgtccggtgcaagccggcagcctgcgcttgctggagcgcccgcgcgcctacgtacacctgcccacggcctcgctgcaactggtctacgacatgcgtctggagctgccgcgcgatgcgcgcgagccgagcctctaccatgtcgacgagcggctcgagagcggtccgctggtggcgcgcctggaccgtcggcgccccgatctctacctgctgccgctggaccatgggcgccccaccggcgacctgttcaccctgcgcaagggccagttgcgccctgcggccacccgcggcctgtggttggccgagagctttgccgtacaggacggctggctggtgcatgaggaacgcatccgtttccgcgactggctggcactgtggccatccagcaacggcgaccaggccggcggtggacgcgaccgcgccagcgcctgaaccgggcgggctttgccgccctttctacttcaactggctggaagacttgccgagcaggcggcgggcgacgatgagcagctggatctgctgggtgccctcgaagatgtcgaggatcttcgagtcccgcgcccacttctccaacagctcatcctcggcgtagccgagggcgccggccagctccacgcacttcagggtgatctcgttggccacccgtccagccttggccttggcgatggacgcttccttcgagttgggcagcttgttgtcggccatccatgccgccttcagggtcaacaggcgcgctgcctcccactccgcctccaggcgatagagagtggcctcggcgtggctgacggtcagcagcggcttcctgtagtcgaacttgcagccagccttcttcagcaattcgcgggtccggtccagcgccgccttggccaccccgacagccatgccggccaccagcgggcgggtattgtcgaaggtctccatgaccccggcgaaacccttctgcacgtcgacctcggcgttgcccagcaggttcgcggccggcacccggcaatcattgaaactgatcgaagcggtatccgaagccttgatcccgagcttcttctccaggcgcgtcacggtcatccccggcgtgcccttctcgaccacgaaggacttgatcgccgcccgccccaggttgcggttcagggtggcccagaccaccacggcatcggcccgctcgccggaagtgacgaaaatcttctcgccgttcagtacatagtggtcgccatcctgggtcgcggtggtgcggatcgccgccgagtccgagccgcagcccggctcggtgatcgccattgccgcccaggtgccgccgaagcgctgcaactgctcctcgttggccaccgcggcgatcgccgcattgcccagcccctggcgcggcatggccaggagcaggccgacgtcgccccagcacagttccatcacgccgagcaacgccgacaggttgccgccgttcttgataccctcctctacctgcttgccggcacgcttgctcgccgaggtcgcaccgacagcctcgggcgagccgctgttcatgccgtccagcaaggccgcgagcaggtccagctccttcggataggcgtgttcggccttgtcgtacttgcgcgagatcggccggaaatagttttccgcgacctgatgcgcctggttggccaggctgcggaatttcttcggggtttccaggtacatgtcgattcctcgttcactcgtcgcggcggaccgcgcactcgctcgggttcacaggtgcaggccgccggccatcagcgctaccgcgcgcaggtcgcggtaccagcgctcggctggatgctccttggtgaagccgtggccaccgagcagctgcaccgcgtcggtgccgatcttcatcgccttctcggcgcacagcagccgcgccaggtaagcctcgcgctggaacggctggccgcgctcggccagggcgcaggcgcgccagaccatcaggcgcatggcgtccagttcgatggcgatgtcggcgaccatgaaggcgaccccctggcgatggctgatcggctcgccgaaggcctcacgctcgttgcagtaggcgatcacgtagtccagcgccgcctgtccggtgcccagcgccagggcacaccaggccagggacgcgtgatcgaggaaggcccggtagtcgaaatgctcggcggccaggcggttgtccgccggcaccttgacgctcttcaggcgcaaccgggcggtgccgccggccttcagtcccatcgccggctcggcacgtcgctcgacgcccttggcggaggcttccaccaggaacagcgcaggcccctcgtcggtcttcgccgcgacgatcaggcggctggcctccaggccgcgcaggaccaggcatttctctccggaaagcaggtagtgactgcccttgcgccgggcgcgggtcgccagtttctgcgggtcgaacagcagactcggctcgttgaccgcgatggcggtgagcggcgccccctcttcgctgacgaacgccggcagccactgcgcctgctgcgaggagctgccccagcggcggatgcagttggccgccgacaacggcaccagcagggccgccgccagcgtcaggtcgcccttggccagggcctcggcgataagggccgtggtcaccgtggtgcgctcaccggccatgccgccgtgcacctcgccgaccccatagtgggtcaggcccagctccagcgcctggttgagcagttccgccggcaggctggcctcggcatccgcgtcatgagccagcggacgcaacacctccagggcgaagccttcgagcatgtccaccagcatctgctggtcgtcggagaacgacaggtcgaacaacccgtccggatcggccttgcgcggtcccttcgcctgcttcgccgaacgctcgctggccaggcggaagccggtacggctgccgctgtagagcagtttctcgaagggtttgcgaagattgaagcgatccggccagtcggcctgggcgacacggttcagtacagccagggcacggccctgtacatcggtgctcatgggcatcttgctccacgcaggatgggatgcccggatcatgcgccgccgcatgggcagcgcctatgaccgtctcgccgaagggagttgtcaggccagccagtcatccgccaggggcgaccgaccggggaaaggctcagcctttctggcggatcttctcgacgatggcggtggtggagctgttctccaccaggccgagcacccgtacctcgccgccgtaggccttgacgatctgcgcgccgaccacctgctcgacgccgtaatcgccgcccttgaccagcacgtccggacgcacctgctcgagcaggcgctcaggagtgtcttcggcgaagctcaccacccagtccaccgcgccgagcccggcgagtaccgccatgcgccggtccaccgagttgatcggccggccaacgcccttcaggcgagtgaccgaggcgtcgtcgttgaccccgacgatcaggcggtcgccctgggcgcgcgcctgttcgaggtaggtcacgtggccagcgtgaaggatgtcgaagcagccattggtgaagacgatcttctcgccgtgggcgcgggcgtcttcgattgccagcagcaattgctccaggcccagcacgccacgctcggaaccctgctcgcgctgcaccgcgcgacgcagttcgggcgcgctgatcgccgcggtacccagcttgccgaccacgatgccggcggccaggttggccaggcccaccgcggacggcagctcctcgccggcggcaagcgccgcggccagggtggagatgaccgtatcgccggcaccggtgacgtcgaacacttcccgcgcccgcgccggcaggtgcagggccggctggccatggcggagcagggtcatgccatgctcgccgcgggtcaccagcaaggcaccgaggtcgagttcgctcatcagcgcctggcccttggcgaccagttcggcttcgtcggcgcaacggccgacgatggtctcgaattcggacaggttcggggtgatcaggctggcgccgcgatagatggcgaagtccttgcccttgggatcggccagtaccggaatgttgcgcgcccgcgccgcctggatcagcacctggtggttctgtagcgcgcccttgccgtagtcggacagcaccagcaccttgaccttggccagcagcgactcgacgtccacggccagggccgccgcgtcggtgcggaacggttcctcgaagtcgacccgcagcagttgctggtggcgactcatgacccgcagcttgacgatggtcggctggctatcgatgcgctggaagcgcgcgtccactccagcggccttgaggctgttggccaggctgtcggcggcctcgtcgcggccggtgacgccgaccagcaaggcctgcgcgcccagcgcggcgatgttcagcgcgacgttggcggcgccgccggggcggtcctcgtgctgttcgacgcggaccaccggcaccggggcctccggcgaaatgcgcgaagtcgcgccatgccagtagcggtcgagcatcacatcaccgaccaccaacaccggggcctggtcgaaacggggcatggacaacttcatgggaactccaaacaacctctcggggcagacgcccagtttatcagccgacaggcgccggcgcctgctcatccagtcccatcgcatgcagccgcgcataatggccgttctgcgccagcagctcggcgtggctgccgcgctcgacgatctgcccctggtccatcaccaggatcaggtcggccttctcgatggtcgacaggcggtgggcgatcaccagggtggtgcgccccttcatcacttcgtccagcgccgcctggatatgccgctccgactcggtgtccagcgccgaggtcgcctcgtcgaggatcagcaggggcgcgtccttgagcagcgcccgggcgatcgccagacgctggcgctggccgccggaaagcagcacgccattctcgccgacctcggtgtcgaagccttgcggcaggttgtcgatgaactccttggcgttggcagccttcgccgcccgctcgatttcctcgcgcggcgcgccagccaggtcgccgtaggcgatgttgttggccacgctgtcgttgaacagcgtgacctgctgggtcaccagggcgatgtggcggcgcaggttgcgcaggcgataatcctcgacttcaacgccatcaaggaggatcttgccgtcattgtgctggtaaaagcgcggaaccaggttggccagggtcgatttgccgctaccggaacggccgaccagggcgatcatctgcccgggctcggcgatgaaactgatgtcatccagcacctgcttgtcggttccgggataacggaagctcaggttgcgcacttccaggcgcccgctgacccgctccttctcgacggtaccctggtcttcctccgccgcttcgtcgagctgctcgaagatgctctcggcgccggcgacgccgcgctggaccgtggaactgacctcggaaagctggcggatcggcttgggcaacaggcccgccgcggtgatataggccaccaggtcgccggccgaggcgtccccgcgcagccacagcacgaggaacatcagtatcgccatggcgacgtagatcaccaattgcagcatcggcgtgtagaccgcgccggtcttggtcatccgcaactgcttgtcggtattgctctggctggcgtcgaggaagcgcttctcttcataggcttcgccgccgaagctgcgcactacccggtagccctggatggtttccgaggcgacgtgggtgacgtcgcccatggccacctggatcttcttgctctgcttgcggaacttgcggctggcggtagtcaccatcaccgcgatgaccggcaggatcgccagcatcaccagggtcagcttccagttcatccacagcaggtagaggaacaggaagaccacggtcaggccctcacggatcaccaccttgatggcatccgtggccgctccggtgaccatggtcacgttgaaggtgatgcgcgagatcaggtggccggagctgtgcgtgtcgaaatagcggttcggcagcaccagcagcttgttgaacagggcgacccgcaggtcatgcaccagccccagggaaaccttggccaggaagaagttgccgaggaacgagcccagcccctgccaggcagcgatcaggatgatcagcaacggcaccgcgtagaccaggtgcaagtcgcgcaaccagggccactgcacattcggaaacaatgccgcgtcaggattggagaggccgtcgacgaaatacttgaggatgcccgccagcatcggctgggtcgaggcgaagatcaggaaaccgacgatgctgagtaggaacattccgatgtagggcttcacgtagcccaacaggcggaaatagatcttgagactggaaggtccgggattctgaggactatcgctcatggtttcttacatgctgaaaaggtcccggagtgtagcacaggacctccatcactctgcctggaaggcgtgttggggtaagatggcgggccgttcgttcaggagctcgcatgcgagtcatagactacccctcctacttgcagttgcgtgacaacgcagaagtgctggaagccgatggtcatggggacaaggtactgcgtctgcgcgacgggtccttcctcaagctgtttcgccgcaagcgcctgatttcctccgcagccctgttcccctatgcggagcgcttcgcccgcaatgccagcgaactggcgcggcgcggcatcgtctgcccgaaggtgctggacgtactgcggatcccacatatccagcgcgacgcggtgcactacgagccgctaccggggcagaccctccgccaactcgaccgcaacgacccggagtgcggcgatacagtccggacgcaactgggcgagctgatcgccgcgctgcacgccaagggggtgtacttccgctcgctgcacctgggcaacgtggtgcgcacgccggaaggccggatgggcctgatcgacatcgccgacctgcgggtccagcgctcggcgctcagcgccgcccaacgcattcgcaatttcaagcacctgctgcgctacgaacaggatcgaacctggttcctcgacgacagcgagcacctggtgctcaaggcctatctccgcagcagccaggtccactggacactcgagcagctcctcaagcaactgcaactggattgagcaaggaatgttcgcagctacccgactgacccgtcttcgccacgataccagccgcatcctcagccactggatcctgccgctgggctggctggccctgctcaccggaatgttctgggtcggcgaccgctccgactatcaccggcttttctacatcctgcttgcagccccgacgctgcttttcgtgattatccagccgcaactgttacgtccactgacccgctcgccgctgctcatcgccattctggccttcagcgcttacatgatgctcagcctgctctggtcaacgccggaaaactcggcgggttcgctgttcaaacggccgctgtacatcgttctactgctcttctgtgtggggatattggcgctacaggcacccgaacgcctacgcaacattacttggctggcggcactgggagcagttttcgccgcagcggtcacggtggtccactaccatctccagacacatcctgcatggatgcgcttgtccggatacggggctctctacaacccactgctgagtgcccatgtatatggtgcattcactgtggtctggctggtttactggatgcaatcacgccatcttcttgcgccactgccgctgctgtccctggcgatactatgctgcctgttgctgtcgaccggctcacgcaccccattgatcgcactcaccgcctgcctgggctggctgctggtcgccggtaatcagaaaaagaccctgatcgtcatcgggttggcagcgctgggcatgatcgtggcttatatcttcaatccagagctggtcacccagcgcggcgtctccttccgcccggaaatctggagcgaatccctgcgccagatcggcgagcacccctggcttggccatggctacgatcacccgatgcggatcaagctggccaacggcatgctgctggccgatccgcacaacatcgagttgggcgtgctgttcgccggcgggatcgtcggcctgctgctatggtctgcgatctacgccctggccttcgtcttcgcctggaagaaccgtcgcgaccccatggtgctgctggcgtctacctggctggtcttcggactggcttccggcctcacggaaggcaacgcgttcatgtcccgccccaaggagcactggttcctgatctggattccattggccctgctgtacgccctgtgggtgcagaaaagcgcccgcgacaaaaacgaaaccgcctcctgaggaggcggtccgggttcatccgagctaggagaaaaacagccgcgcaatgccgcggaaggtcttctcgttccagtacttcagcggcaagccggagagcagctcccgggccagcaccttgtcccggttcgagcacttgagaaacatcgaattgcggaagcgcatgatcacctgctcgtaatcggggtgatcgctgaactggctgtacgtcttgaatacgttgtccaccatgaaacgggcgttcttgtacgtattggtgggatgcttgcggtactgggcgaggacctcgccaagaatgtcaatgacgtagccagccttggttaccgccagttcgatgtagacatcttccaggcgtatgtccggatcgaaaccgccgaccttctccagggcttcccgccggaacatcagggtgggcgccatcgggcccggcttgcggtccaggaacaggtcatcgaagtcgagacggcggaaaggcaggtcgcgtttgcgctgctccttacccggcatgacccggccattggagtcgatgatctcgatattgcccgcgcagatacctacctcgggcttgtcccacatgtgtgccacctgtttctccaggcgttgcggcaacatgatgtcgtccgaaccgaaaggcacgatgagatttccccgggccctggcgatcgcctcgttgagcgttttcgacagtccctggttctgctggaccctgaggtcgaagccgtacttcgcctggagcccgcgcaaaagctcgacgctgccatcgctggaaccatcgtccaccaccagcagttccacgttgcggtatgtctgcgcagccacgctggcgatgctcgcttctatatacttttcgtggttataggaagcgatgatcacggaaaccaatggctgcgaaccatcatcgacgagcgccatagctacaaccttatctgtccttcacgtccccattcaaagcgccagacatgcatgagcgatcctgcgatcttcatcggtcctacacctccccccagcccggaaaaacaagctgaacaatagcaaacacgcctgaagccccagctcttttcggctgctactctcaggtaaaaatacgtcgccaggtcttctccagccatccgggacgctccggctcgcgcaacgcgggccgcatggcctcgacgatactctgaccgacagcggcgaagctgaatcgttcgatggccagcgcctggccgcttcgcgcgatccgctcggcgagagccgtatcgaggcgcaggattgcgagcttttcctggatgtccgccaccgagcgatacagcacgatattctccatgtcccggaaacccaaggcctcgttttcccgctcgccctggtcgtaggccagcagtacgcaaccgcaggccatcgcctcgaaattcttgatcatgtattcgcccatgccgacatccgcgctgacgaagaaacggatgcggttgagcgtacgcaggtactcctcgccggacttggtcttggtcaccagcaggttctccactccgcccaactcgtcgagcagcgccttgcgtccactgtaagccacgctgccggtactgccgacgaagcccagctcgatatcgcgcgccaggcccaggtcatgcaacagggtctggcgtagcccttgggcacgaataccgcgtcgaatccctcctggcgcaggcgttcgctgaccgtatggcccgaactgatcacccgtgcccagggcaggcgccggtaatgggcgctgaacttgccggtgtacttgcagggaatgtagttctggtaggcatcgtgctcgaggatcaccaggttgggcacgctgcggatgaagcggacctggcgcatttccttcttgaaacggaggaagaacaggatgcggtcgtagcgcgagacatccacgtgcttgcggaagtagccgcgcaggtcggcctgctcctcgctgctcagccagcgggtatcgcactcgcaatgggcagcgatgccgtcgtacaggcgatccaggatcgcgcgctgctctttctggaccagaaacagaactttcatcagaccttcatcctcgcggctgctccgaagcagcatggcggctcgaaccttgccgaacgctcgacccaagcatcacgcctccccatccagcgactccacccagaacaactcgtgccgacgcaccgccttgcgcatgaactcgtcctcgccgtaagccggccagcgacgcccggcgagccagccctgcagacggcggcgcagacggcgcttgaacggcggcctgggttgcaggtcgtgcatcatgcccaaggccatggccttgtccacctggcgcgtgcgctccagcgccagcgtccatggcagcaacggcgagcattcttcggtcagcggtggcaggctgacccccatgtgcgcatcgcccatcggccagcgatcgttgtcgtgcaggtgattggcatagtgcaacaatgcctgcggctgccagtccaggccctggagcgcctcgcgcacagcctcctgggcgcggacatggtccgggtgcggatcgaaatgcggatgaggcaggacgatgacctcgggacgtgccagcaggatcagctcgcggagatcggccagcagattgttccaggtcgacaggccgtcggcatcgctggccaggcgcaggcggttgaactggcggaacggacggatatcggcgagatcggcctcacgggacggcaccacctcgcccgggttcgcctgcatggcaggcaattgcaggcagaaataacccagttgcacgcagcgctcggccggcaccccaccccacgtcggcacggcctggctatcccaggcgcgcaggcggcccttcaggcgcgccgcagctattccgtcgaggcccatgcggcggtaatgctcggtttcgatctcgccggcggtcagggtcacgatccaggcctcgcgagcctggctgtagaggccgaaggcggccagctcggcgtcgtcggcatgcggagcgatgaccatcacccgccgatcacggtagtcgggatggcgcgcacgccacagggtcggttcgccgaccagccggcaatgccggccgcgcaggcgaatccggccctcgcccagcggcccggccagtcccgtcaggttcaggtagcgcaagccgttcaccccacgttcgaaagcctgggcatcggcctccgcgccaccttccagcagcaccgagggttcgaggaagcgccccagccagccagcgcgcacgccgatgccaagcaccagcgtatcgccttcgcgcaactcgccgtcgactcgcagacggccatccgccaggcgtaccggcagcgactcgaccccttccgcgaaacggtagcggtagtcctcgcccgacgaatagaacaggtgatcggcgaaccaggcttcgtgggcgacccacaggaccacgaggaggatcggcaacaaccaggggctgaccagcagaccgacggccagcaatgccagcagcgcaaccagtaggccgatccgcttgttgcgtcgatgacgcttgagcaactgctgcttgcgtgcgctcatgcttcagacctggaagaccggagaaggatggcaccagcgatccttgtattcgcggtcggcgcgaccgaacgaatagcgcaggggtttgcccagcgctcgcgcatcctcccaggcggcctgggtgttcaggtaactgagcacgctgccagggctgaactcgcgggtctgcggatcgacgccgccgttgatgtactcgacgctgagccagcccggcgcttcggcgcgatacagtacctggaccgcgatgggctggtcgttgagcagcaggaccgagccgcgcagcaattcgcgcagccgctcgaagacctcggccatgcgctccgcgccggtggcagggaaaccccagcgacgctggaacagttcaagatagatggcagcgaactcggccggggcgaagctgtctgcctggcgcacctggccaccggcctcctccaccaggcgcacttcgcgccgctggttatagcggaacttcttggagaaatcctcgggagcacgagcgaaagccagttgctcggtctgagggcgcagcgtgacgatgttccgctcatgcagcgccgacaggtagcgtcccgcatgacggagggcgatgcgggcatcgccggccaccggcaggatcagttcggcgttgcccaggtcgtacaggcccttcttgccgcgccgcttgagcacgtccttggacaacgccaggtggcggccccaggtcgggatcgccgcaaccagttcgccagcgctctcccaacccaggtaacgcaccgggattccagccatttcggcgagctgctcgaccaccagcgggtgggtcgcgacgctgccgccgaaacgctgccaggcctgggcgtaggtcggcgcgtccacttcgcgccaaccgcgttcgcggaaggcgcgcaacctgttcagcatgcagactccgaagcgaagccggcaatcgtcggcaggcgccagaattcgcggcgcaccgcagcgtcggagaagcgtgtctccaggcgctcgagcatgagccgcgcacaggcctcgcgctggcggcggtcaagcgccgccaggtgggtcaggccctcggccagggccgtctcgtcgcccagcgggaagaggatgccgaccccttccaccacttcgcgggcgccgccacaggcggtggcgatcagcggtacaccggcaaccatggcctccagcaggaccatgccgaacggctcgtggtcggaactcagggcgaaggcgtcgaacgccttgaagtagcgccgcgcctcttcgacctggccgaggaacagcacgcgctcgccgatacccagttcgcaggccaggtccttgagctgctcttccaggcggccgctgccgaggatcgccagcaggctgttctgcggcaggcgcggcagcgcggcggcaaagccgcgcagcagggtagcctggtccttgtccggatgcaggcggccgacgttgccgaccacccaggcctcgtcgggcaggcgcagttgccggcgcgcactcaggcgctcgacctgctcggcctgcagcgcagcgacgtcgatgcggttgtagagcgtctcgatccgctcccccggccacttcggcaggcaacggcggatatcgtcgcgcaccgcgtcggacaccgccagcaggctcaggcgcttgctcatcaggccggcgaagaccttgcgcgacaaccgctggtaatcgccgaaggcgtggtgcacgccaacgatcggcagacgagtggccaggctggcgatccagatcggcttgaagcggtgcgcgatgcagaagcggaagtcgcgcgaacgggcgatctcgcgcaagtcgcggatcgccttcagcttgaggccacggatgtccctggagccgtactcgaggaacagtacctcgtcggaggcgcaacgcgccgccacctcaggatcggaacgcccggtgaggaacaccgtggtgaccttgtacggggttccggcgaacaggctggcgtactgacgggcacagtcgaggaaaggcccgtcgtagccgtgacagaactgcaggacgcgaggttcagccgaccgagtcataccagtccacgccctccttcacgaccaggatgtcctccatgatcaggtactgcagatcggagccgaagaacatgttcagggcgtcggtcggcgagcagatcatcggttcgccacggcgattgagcgaagtgttcagggccacgccgttgccggtgaggttctccagttccttcatcaggtcgtagtagcgcgggttgtactcgcgcttcagcacctgggcgcgggaggtaccgtcttcgtgcaccacttccggcactcgctccttccactcttcgttgacttcgaaggtgaaggtcatgaacggggccgggtggtcgatcttgaacatctgcgggccgacggtatccagcatcgacgggcagaagggccgccagcgctcgcggaacttgatctgcgcattgatccggtcggccacgcccggcacgctcgggcagccgagaatggagcggccaccgagggcacgcggaccgaactccatgcgtccctggaaccaggccaccgggttgccgtcggcaaggatcctgccgatacgccggctgcggttgtcgatcttctgccactgcggcctggcctcgtgacgggcgcaggcggcgatgacgtcctcgttggaatactccgggccgaggtagacgtgctccatcttctccaccggcacgccgcgctggtgagacacgtaggccgccgcgccgaccgcggtgccggcgtcgctggccgccggctggacgaacagctccttcacttcggggcgcgagatgatcttctggttgagcttgacgttcagcgcgcagccgccggcgaaagcgaccttgccggtctcgcggatgatatcgccgaggtagtagtccatcatctccagcgcgagcttctcgaacagcgcctggatgctcgcggcgtaatggatgtagggatcgtcggcgatgtcgccttcgcgcttgggccccagccactcgatcagcttgggcgagaagtagtagcccttgcctttctccttgtagcggcggaagccgatgacgttggcataatcggtgttgatcaccagttcgccgttctcgaacttggcgagacgggagaaatcgtacttgctggcgtcaccgtagggcgccatgcccatgaccttgaactcgccgtcgagcatgtcgaagccgaggtactcggtgatcgcgccgtacaggccgcccagcgaatccggatcgtagaactccttgatcttgtggatccgaccgttctcgccccagccgaagaaagtggtggcgtattcgcccttgccgtcgatgccgaggatcgcggtcttttccttgaaccccgagcaatggtaggcgctggaggcatgggcaaggtggtgctcgaccggctggatcttgattttcttcaggtcgaagccgagttgctgcaggcaccactcgatgcgcttgtagtaacgcttgtagcggcggttgccgagcaggatcgcatccagcgcgcgatccggcgcgtaggcgtagcgcttggcatagtgccagcgggccttttccatgatgctgatgggagcgaagggaatcgccaccacgtcgacatcggccggctcgatccctgcctgctccaggcagaacttcgccgattcgtagggcatgcggttcttcgcgtgcttgtcgcgcacgaagcgctcttcctcgacggccgcgaccagcttgccgtcgatgtacagggcggcggacgggtcatggcttacggcgccagacaggcctaggacggtcaatgccacggtagaacctcttcaaagcagctcgcggttgcggagtgggaccgacaaccgcggctttcgtttaactcgtcgaccgccgcaggcggtggtcgtcgcttgtcgttcaagccccggcggcgtcgccgaggcggggaatccgttgctccagcagccggtagaggccgctgtcctgcggccagttgcgcaggaagcgcgcgcggtcgcgggcgtaggcgcgggcaaaggacgcctggctgtgatgcttgcgcatcgcgtccaggtcgatcagcgcccattcgccgccttgttcatgggcctgccagaacaggttgtgtcccttcaggtcgccgtggctgatgcgttcgcggatcagcgtcgaaaacagccgatccagtgccgccaactcggcttccggtggcgaaacggcgccatcgggcatgtccaggcaaggcttaaaacgagcgattatatcctgaccgccgagataatcggtaatcaggtaggcgcgcccgcgcagccagcaccagcgccgctccagcatcgccagcggacgggcggtggcgatgccgaggaattccaggcggttgccttcgcgccaggaggcccaggcccggctcggccgccagaagcgcttcagccaatggacccagcccttgatgttgtagcgtttgatgatcagcgtgcggccgttcgcttcgacccgggcgacggtggccgcgccgccgtccttgtagacgtggccggcggcgatcaggcggtccgcgtccgccagcagcggcgccatcgtctcggcctcgctgcggcgggcggcgaacaggcggaacggaccgcgcacgacgctgaacaggctacagtcgcgaccgaccttcctcagcaggtcgcgtacccgccagcggcgaaccttggcgatttccttctgcaaggcttccagcggcagcgcatgttcgccgttggccagcaggtaatgcaccagcaactcctccaggaaaggatcgaggagcgccggcaactgggcgaagaacaccccgaggttttccagcactttctgtcgcgacagcggctggccgggagtttccgcacgcacgccgccaccgtcgatgagatacaggcggccggcgtggcgcaacaggttgtccagatgcaggtcgtcctgccagaggccctttgcatgcagctcgccaatggctgccagggcttcgccgagcaccgcttgctgggcatcgcccagcggcgcctgggcctccaccgcacgccaggcgtcaccgaggctctgcgccgcgtcgaggtagtcgaacagcagccagccgccctcgccctgctgcagcccgtcggccagcagcgccggggtggtcagcccctgggccgcgagcagacgcgccccttccagttcgcgctggaaatgccgtgcggccttgccgcccaccagcagcttggccagcaccttgcgcccacgccattcgccggcaccgacgtagcgctgcccgggcagcacccgcagcagactgtccaggcgcagttcggcagcgccagcgccatccgccagggtcacccgcaatggcagttgcgggtggcgcccggcggcttgcagttcggccagtctcatcggcgcgactccttgcgccggcggcgctggtcgagaaggcgataccactgctcgacctcggccgagtcgaggggttcgtcgacataggcggagatgaattcgtgcacgtccgcttcgctccagtccggggcacggcgcagcatcggctccaggtccttgacctggtcgcggcggccgaaccagatcgggcgggtcttctccaggtcgatcaggcaggcctcgaagacaccatcggccccctcgcggaggaatacatgcttgggatagaagcaaccatgcatctgtccggccgcgtgcagctggcgcgccagcctgccaaccgcccggagaatcgcccggcgccgctcttcggccaggtcgtgccaggacgccagccaggtgtccaggtcctgccaaccgtccagggcacgggtcaggaggatcgcctggcgctctccgccgaccgcctgctgggcgaagaacgccgcctgcagggcgggaatgcccagcgcccggtagcgctcgatgttgcggaactcgcgggcgaaggtcggctcgcccagcggatggcgcaggctgcgggtcaggtggttgctctggcgcttcaggtagtaggcggagtcgcccaggtcgagacggtagacgctgctccagccaccccgttcggtattcggttcgtccacggcatccagctgcaaggcccacagggcgtcgaagctgtccagacggttgcgctggagcaggtcgtggtcctgcgcggcgatgaaaacgctcattcgcgcccctcgaagaaagccaccacctggcgaatacgcttcttgtcggattcgttcaggtgccggcgacggcgatattgcaggtagaagcgcaggcgctgggtgcgcgacaggtggtacttggccaccttgtccaggcaggccaggtccttggtgatccggtagcgcagcatgaagctccaccagaacgcgccgttcgggcagtcgatgaaatacaccagcggctgggcgtccaccagcaggttgcgccacttcaggtcgttgtgggtgaaatgctggtcgtgcatcaggcgcgtagccttggcgatctgccggctgacgccgtccacccagcgcgggtccttcaggcgcggatcccggttgcaggcgagcaccgacaagtcctcggtgcccggcagctcgcgggtgatcatggcgccgcgctggaaggcgccggccttgcgctccagcccccaggcgaccacttcggcggtgggaatgccccacttctcgaagcgcttgaggttctgccactcggccttgatccgcggtcgcgccaggtagcggcgcaggcccttgccggcgctgcggtagcgcttgacgtagtaacgcacgccgtcgcgctcgatgcggatgacttcggacaacgggtcgcgggtcaggcgctcgccctccagggcgaacacgctatcgaggctaccgaagtcggcggccaggtgacggtaatcgggttcgagggtccaccccgccatcagagcaggtctccgtaacgctgcttgcgttcgtagagtttttccgccttgcgttccatccaggccagcaggccggcctcgtcgcgcagtatctcgcgcaacggccggcggaaataggtgcgcaggaagcgtagcttgtcgcgacgcgtcagtccgatgtccagcgcagagaaatacaatgccgccagatccttgttacgccagcgtttcggcgtggcgtcgcgggtctgggcacggtgcagatcgatcaccgagaggcggaaatcgtccgcgctcaccggcttgtcggtgtgcaacaggaaatgacagatgtagcagtcgcgatggttgactccggcacggtgcatgtcgccgaccatccgcgccaccgcctcgaccagcgcgcgcttgagccgcggcggtggaggacgttcgcgccagtcctgggagaacacctcgaggtccacggtcggcgccagttcctcggtgacgatgaaggaatgctgccgcgccggatcgctgccgcgctcgccgtaggcgaccgcggtcatggtcgctacgccggcctcgtgcaggcgccggatggcctgccactcctggcgcgcgccgagcaccgggagcttggcggtgagcaggttcttggcgatctcgccccagccgatgccacggtggatcttgacgaagtagccacgcccgtcgacctcggtgcgcagggtgcggcgcccttccagttcgcggtagaccttgccttgcagcgcctccaccgcctcgaacgggtcgcgcccgctccacaggcgcttgaacggctcttccagcaccagcctcatgaggcctccccgaggatcaggtcggcggcgcgctgcggcatgctgtagagatcggcgtgatcggcgtaggccaggccattgcgcgaccaggcggcgcgcgccggagcgtcctccagcatttccgcgagcaggcggttgagactgtcctgctcgaagggactcggcagcacccgcccggcgtcggcctcggcgatgtagtgggcgtagccgcagacatcggtcaccaacaccggcaggccggagaccagcgcctccagcagcaccgtaccggtgttctcgttgtaggccgggtggatcagcaggtcggcgccgagcaggaagcgcgggatatcgctgcgacccttgaggatctgtacctggtcgttgagaccgagggcggcgatctgtagcaggaacggcttgggatcgtcctggccgatggcgatcagccgggtacgcctgcgcaacgccttgggcagcgcggccagcgccttcaggctgcgatccaggcccttggtcttgaagccggaaccgatctgcaccagcagcaggtcgtcctcctccaggccgaactcgcggcggaattccgcacgcacgtccgcggcgttggccggcgcccggcgatcctggctgatccccggcggcagcagatggaaacgctcggcctgggtgccgtagtgcttgacgaagagcggctgctgcacctcggagatcatcaggatctcggtcttcgaggccgggtcgaacactgcccgttcgtagccggcgaagtggcggtagcggccccactggcggtacagcgggttgcgcaaggtctgggccttttcctcgaaacaggcgtcggcggcgtagtagacatccagtccgggcatcttgttgaagccgatcacccgctgcaccgggcgcctgtccaggtcggcgcggacccacgcggtgaacttctcgttgcgccggtggttgaagatcgagcgcaccggggccaccagcacttcgaagccgtccggcacgtcgccctcccagatcagggtatagacgcggatgtcgtgcccgcgccgctggcattccagggcgatgcgcatgaagtcacgctgcaggccgccgaaggggaagtatttgtagaggatgaacgccagggtcatcggagggtctccggggccagcagcatggcctccagctgggtggccacgcgctggggattcagccgggtgaagcacagcggctgctcacgcttgagatcgaacagtttgcgatcctcttcggtcggctggtaggtacaagtcttcttcaggcacggcgcacaggggaagtcgctgcccaggtggacctgggaacgcccgtaggcgccggtgaagccaggattggtcgggccgaacagcgacagcgtcggcacgtccagcgccgccgccaggtgaccgaggccggtatccaccgccacgcaggcgcgcgcgccggcaagcaccttggccatgccggccagggataatctggggagtaccgcggcattttccaaccccgccgccaggcgcccggcccgctcccgctcggcggcgctgccccagggcaggcgcaccgaccagccgcgctcgcacatgcgctcggccagttcgcgccagtaggcttccggccaatgcttggtgacccaggtagtaccgtgcaggaacaccaggtacggcgcgccagggtcggcgtcggccaactgctcgcggtccaggccatagtcaccgaccgactcgggcaacgggtagtccagcgcctgggcgaacaactggcgcgtgcgctccaccgcatgctgtccccaggcgaccggataggcacggcgatagaagcggctggcgagcggctcgcgcgccgagtcgcgatcgagaccggcgaccggcgtcttgcccacgtagcgggtcagccaggcactcttcagcagcccctgggcgtcgatcaccaggtcatagtcgacttccttcaggcgctgcttgaagcgccgccattcgccgttgcgcagggtctgccagaggttcttgcgccagcgccggatcgccaccgggatcacccgcgccaccgccggatgccaggcgggaatctcggcgaaaccttcctccaccacccagtcgaactggatgccgggaatcgcccgggcggcgtcggtaagcgccggcagggtgtggatcacgtcgccgagggacgaggtcttgaccagcagtaccctcatccggcgacctcggcagggtcgccgaccagccgctccagggcttgcaataccaggccaggcggcagctcgcggaggcaattgtagtggccgaagcgacaggtgcgctcgaagcacgggctgcactcgagaccgaggcggacgatctccacccggtccgccagcggcggggtgaactgcggcgaggtggagccatagacgcccaccagcgggcgatccagcgcggccgccacgtgcatcaggccggaatcgttggacaccaccgcgccagcgcaggacatcaggtcgatggcctcggccagcgaagtctccccggcaagattgaaggactcctcgcgcaaccccggaatcaggcgctggcgaatctcctctccaccgggatggtcgttcttcgagccgaacagccagacctgccagccggcacggatcttcgcctcggcgaccgcggcgtagtgttccgccggccagcgcttggcctcgccgaactcggcgccgggacagagcgccagcaccgggcggtccaggctcagggcgaacttgtcgagcgccgcctggcggctgccgtcgtcgatccgcaggcgcggctgcggatagggcttcggcaactccacgcccggctcgaaggccagggccatgaagcgttcgatcatcagcggatagcgctgcttgtcgagcttgcggatgtcattgagcagcccgtagcgcatctcgccgcgccagccggtgcgcttcggtattccggcgaaccagggcaccagcgccgacttcagcgagttgggcagcaggatcgcctgctcgtactgaccgcgcaggccgcgtccgatccggcgccgtgtggcgacgtccatcaccccgtggccgagcgggaagctcagggcctggcgcacctcgggcatgcgctcgaggatcggtcggctccactcgggcgccagcacgtcgatcacgcactcgggatgccgctggcgcagacactggaacagggtctgcgccatcaccatgtcccccacccaggagggacctacgatcagaattctcattcaggctccggaaatgatcagggaggctttcgcctccctgtcacacccttcttcggtgcttacttgaccagggtacgccactcggcgtgggcctcggtcttgccgctgaccaggtcgaaataggctttctgcagcttttcggtgaccgggccacggcggccggcgccgatcttgcgaccgtccacttcgcggatcggcgtgacttccgcggcagtgccagtgaagaaggcctcgtcggcgatgtacacctcgtcgcgggtgatgcgcttctcgaccagtttaaaaccgtgttcggcggccagggtcaggatagtgttacgagtgatgccgttcaggcaggcggtgacttccggggtgtagatcacgccatccttgatgatgaagatgttctcgccggagccttcggccacgtagccttccggatcgagcatcatggcctcgtcggcgccgccggagatcgcttcctggagggccagcatcgagttgatgtaggcgccgttggacttggcgcgggtcatcgagatgttgacgtggtggcgggtgaaggaactggtgcgcaccttgatgccttgctgcagggcttcctcgcccatgtaggcgccccagctccaggcggcgatgatcacatggaccttcaggccgctggcgcgcaggcccatgccttcgcttccgtagaacaccatcgggcggatataggcgctttccaggttgttctcgcgcacggcggcgcgggtcgcctcgttgatctcgtcgcggctgtacgggatctgcatgttcatgatgtgcgcggagtcgaacagccggtcggtatgcgcctgcaggcggaagatcgccgtgccctgcggggtgtcgtaggcgcgcacgccctcgaacacgcccattccatagtgcagggtatgggtcagcacgtgcgtggtcgcgtcgcgccactgcaccagttcaccgtcataccagatcacgccatcacgatcggccatcgacatagttgccagctccttcagatattcgttacgtacttgcgttacgtgcctgagtggatcagccgagccgcagctcgcgccagatcctgatcacttctcgccgctccgtctggaagtgctcgccgctcacgaccccggcctccttctgtagtgccaggcggtgtgcggctgcgcgataggccttgtaggcctcctgcaggagacggacgtcctcgctggcgatcaggccagcccgttccagtccttccagaatgcggatgttatcggtgaattcgagcagcgccgggtgttctccagaccaagctagaaccgcatattgcaccataaattcgatatcgacgataccaccggcatcgtgcttgagatcgaaggctgccgtggcctcgaaggcattcgaggcggtaccggcggcggtcgcgcgggttcccaggttgtcgcgcatcttggcgcgcatttcgctgacttcggtgcgcaacgcgtcgagatcgcgcggcctcgccagcacctcggcacgtaccgcctcgaagctcgcctgcacccgccggcaaccggccagcacccgggcgcggaccaacgcctggtgctcccaggtccaggcctcctgctcctggtagcgctggaaggcgcccagcgaactcaccagcaggccggccgcgccgctcggacgcaggcgcatgtcgacctcgtagagggtgccggatggcgtctgcgcggtgaggaaatggatgatcttctgccccaggcgggtaaagaactgcgcgccatcgatggatttgccgccatcggtctcgcactgggggtcgccgtcatggatgaacaccaggtcgaggtccgagccatgaccgaactccagcccgccgaccttgccgtagccgacgatgacgaagtccggatcgcacggcgtgccgtcggcgcgcaacggccggccgtgacgctgcaccaactgccgccaggccagttcgaggacctcgacgaggatcgcctcggccagccaggtcaggtagtcgctgaccttcatcaacggcagcgtgccggcgatctccgaggccgccacccgcagcccgtgggccagcttgaagtgacgaagggtctccatctgctgctcgaggtcgtcctcgggaatccgcatcagccgttcgcgcagctcggcggccagctcggcggcctgtggaggacggaacaggcgcccctcgttgagcagctcgtcgagcaggatcgggaaccgcgcgatctgctcggcaaccatcgggctggccgcgcagagggtcagcaggcgctccagcgcgccggggttctcggtcagcaacaccaggtaggcggaacgccgcgccaccgcttccaccagcggcaaaacccgctccagcaccaggtccggctgggggttttccacggtcatcgccagcaggcgcggaacgaaggcatccaggcgctcccggccgagacgctgcatcgctcgtacctgggggccgtggcgcagatcgctgagacgcttccaggccgcctcggcatcgacgaagccggcgtcggccagttgccggctggccgactcctcgtccagcgcctcctcccacagcgggatccactcggcgccgacgctgccgcaggccgcctcgccgctttcgtcctcgtccgggtcggcgatcacctggcggaagtgccagtcgatgcgcgcccgccagtggctcaggcgctcgtggaatgcggcccaactggcgaagcccatgatgaaggccacgcggatgcggtcgtattcgtcgctgggcagcatttgcgtctgccggtcggccagcgcctggatggcatgctcggcgtagcgcaggaactcgtagccgccgcgcagctcctcgaccaccgccggcggcaggtagccctgcccctccagggtcgccagcactttcagcagcggccgttgctgcaagctcaggtcgcgcccgccatggatcaactggaaggcctgggcgatgaactccacctcgcggataccgccttcgcccagcttgatgttttccgacatccccttgcgccggacctcctgctggatcagctgcttcatggtgcgcagcgcctcgatggcggaaaagtccaggtagcgccgatagacgaacggccgcagcatgccgagcagttgctcgcctgcctgctggtcgccgccgaccacccgcgccttgatcatcgcgtagcgctcccagtcgcgcccctggtcctggtagtactgctccagcgcggcgaagctgtagaccagcggtccgctggagccgtagggacgcaggcgcatgtcgacgcggaagacgaagccgtcgacggtgatcgcatccagcgccttgatcagtttctgccccaggcgggtgaagaactcctggttgtccagcgaacgcttcgccccctcggtctcgccgccctccgggtaaccgaagatcaggtcgatgtccgacgacaggttgagttccaccgcgcccagcttgcccatgccgaggaccaccatccgctgcggttcgccggagcgccggccgatcggcgtgccgaactgctcgcactggcgccgatggagccactcgcaagccaggtcgatgcaggcgtcggccagggccgacaggtcgcgacaggtttccgccagcgcggcgcggcgggtcaggtcgcgccagatgatgcgcagttgctggcgtgtgcggaaacgtcgcaggcgccgaccgagttcgtcctcgtcggcgcaatcctccagccgcgcctgcaactgactgcgcagttcgccgggcgcctgggggttctccagctcgccgcgttcggccagttccagcagcatcgccgggtcgcgcactgcctgctcggcgacgaaatcgctggccgcggcgacccgtcggaaatcctccaggcgctcctcgggccaggcctccaggcgggccagggcggcggcatcgagggcggcgacagcggagcggagggcagtcccggcgcgttcggcggcgggcagcagggtggccggcagattcgccagcgaaggcaggctcatggtctatcctgtttgggcttccgaccgaagaccacaggctcgacgcacaacgtcgaaaaggctctacatcgggccttatagcctgacagcgacaatcgaaatgtagttttactactaaaaattgtatccagagggctgtttctcagactgatctgtagtaaaactacaagtcgccgggtacacccccggagaacatccaagaattagctgcggtcgcccacgaggccggccgctcacctatggcatccgattctggaagcctttccgccctggagcaagccatgcaagacctcgatcccgtcgaaacccaggaatggctggacgccctggagtccgtactcgaccgcgaaggtgaagaccgcgctcattacctgatgacccgcatgggcgagctggccagccgtagcggcacccaactgccctacgcgatcaccacgccctatcgcaacaccattccggtaacccacgaagcacgcatgcccggcgacctgttcatggaacgccggatccgctccctggtgcgctggaacgccctggcgatggtgatgcgggcgaacaagcacgacccggacctgggcggccacatctccaccttcgcctcctcggcgaccctctacgacatcggcttcaactatttcttccaggctcccaccgacgaacacggcggcgacctggtgttcttccagggccacgcgtcccccggcgtctacgcccgggccttcctcgaaggccgcatcagcgaggaacaactggagaacttccgccaggaagtggacggcaacggcctgtcctcctatccgcacccctggctgatgccagacttctggcagttccccaccgtatccatgggccttggcccgatccaggcgatctaccaggcacgcttcatgaagtacctggaaagccgcggcttcatccccgccggcaagcagaaggtctggtgcttcatgggcgacggcgagtgcgacgagccggaatccctcggcgcgatctccctggccggccgcgagaaactcgacaacctgatcttcgtcatcaactgcaacctgcagcgcctcgacggcccggtccgcggcaacgccaagatcatccaggaactggaaggcgtgttccgcggcgccgagtggaacgtcaacaaggtcatctggggtcgcttctgggacccgctgttcgccaaggacaccgccggcctgctgcagcagcgcatggacgaggtcatcgacggcgaataccagaactacaaggcgaaagacggcgcctacgtgcgcgagcacttcttcggcgcgcgtccggaactgctggaaatggtcaaggacctttccgacgaggaaatctggaagctcaaccgcggcggccacgacccctacaaggtctatgcggcctaccaccaggcggtcaaccacaagggccagccgaccgtcatcctggccaagaccatcaagggctacggcaccggcagcggcgaagcgaagaacatcgcgcacaacgtgaagaaggtcgacgtcgacagcctgcgcgcgttccgcgacaagttcgacatcccggtcaaggacgccgacctggagaagctgccgttctacaagcctgaagaaggcagcgccgaggccaagtacctggccgagcgccgcgccgcgctgggcggcttcatgccggtgcgccggcagaagagcatgagcgtgccggttccgccgctggaaaccctgaaggccatgctcgacggctccggcgatcgcgagatctccaccaccatggccttcgtgcggatcatctcgcagttggtcaaggacaaggaactcggcccgcgcatcgtcccgatcgtcccggacgaggcccgtaccttcggcatggaaggcatgttccgccagctcggcatctactcctcggtcggccagctctacgagccggtggacaaggaccaggtgatgttctaccgcgaggacaagaagggccagatcctcgaggaaggcatcaacgaggccggcgccatgtccagctggattgccgccggtacctcctacagcacccacaaccagccgatgctgccgttctacatcttctattcgatgttcggcttccagcgcatcggcgacctggcctgggccgccggcgacagccgcgcgcacggcttcctgatcggcggcaccgccggtcgcaccacgctgaacggcgaaggcctgcagcacgaggacggccacagccacctgctggcctcgaccatcccgaactgccgcacctacgatccgacctacgcctacgaactggcggtgatcatccgcgaaggctcgcggcagatgatcgaagagcagcaggacatcttctactacatcaccgtgatgaacgagaactacgtccagccggccatgccgaagggcgcagaggaaggcatcatcaagggcatgtacctcctcgaggaggacaagaaggaagccgctcaccacgtgcaactgctgggctccggcaccatcctgcgcgaagtcgaggaagcggccaagctgctgcgcaacgacttcggcatcggcgccgacgtctggagcgtgccgagcttcaacgagctgcgtcgcgacggccttgccgtcgagcgctggaaccgcctgcatccgggccagaagccgaagcagagctacgtcgaggagtgcctgggcggccgtcgcggcccggtgatcgcctccaccgactacatgaagctctacgccgagcagatccgccagtgggttccctccaaggagtacaaggtgctcggcaccgacggcttcggccgcagcgacagccgcaagaagctgcgcaacttcttcgaagtggatcgtcactgggtggtgctggccgcgctcgaagcgctggccgatcgcggcgatatcgagccgaaagtggtggccgaggccatcgccaagtacggtatcgatccggagaagcgcaacccgctggattgctaattcgctccatactcccctcggcagcgaggggtttcgagcacgccggcgccgccaacgggcggcgccggctcacaacgaaccaaggaccaaaagtctttgttttgcgcgccgcacagcggtggtggcacgtaaaaggagaggaatgtgagcgaactcattcgcgtacccgacatcggcaacggtgagggtgaagtcatcgagctgctggtcaagcccggcgacaaggtcgaggccgatcagagcctgctgaccctggaatccgacaaggccagcatggaaatccccagtcccaaggccggggtagtgaaaagcatcaaggcgaaggtcggcgacaccttgaaagaaggtgacgaaatcctcgagctggaagtggaaggcggcgaacagcctgccgaagccaaggccgaggcagcgcccgcccaaccggaagcgccgaaagccgaagcgcctgctcccgccccgagcgagagcaagccggccgcccccgccgcagccagcgtccaggacatcaaggtcccggacatcggctcggccggcaaggccaacgtcatcgaagtgatggtcaaggccggcgacacggtcgaggccgaccagtcgctgatcaccctggaatccgacaaggccagcatggagatcccctcgccggcctccggggtggtggaaagcgtctcgatcaaggtcggtgacgaagtcggcaccggcgacctgatcctcaagctgaaggtggaaggcgccgctccggcagccgaagagcaaccggcagccgctccggcccaggccgcggcgcccgccgccgagcagaagcccgccgcggcggcccctgcgccagccaaggccgataccccggctccggtcggcgcacccagccgcgacggcgccaaggtccacgccggcccggcggtgcgcatgctggcgcgcgagttcggcgtcgagctgagcgaagtgaaagccagcggtcccaagggccgcatcctcaaggaagacgtccaggtcttcgtcaaggagcaactgcagcgcgccaagtccggcggtgccggcgccaccggcggagccggcatcccgccgatcccggaagtcgacttcagcaagttcggcgaagtggaagaagtggcgatgacccgcctgatgcaggtcggcgccgccaacctgcatcgcagctggctgaacgtgccgcacgtgacccagttcgaccagtcggacatcaccgacatggaagccttccgcgttgcccagaaggccgcggcggagaaggccggggtcaagctgaccgtactgccgatcctgctcaaggcctgcgcccacctgctcaaggaactgccggacttcaacagttcgctggcccccagcggcaaggcgctgattcgcaagaagtacgtacacatcggcttcgccgtggacactccggacggcctgctggtcccggtgatccgcgatgtcgaccggaagagcctcctgcaactggccgccgaggccgccgagctggccgacaaggcccgcaacaagaagctctcggccgatgccatgcagggcgcctgcttcaccatctccagtctcggccacatcggcggcaccggcttcacgccgatcgtcaacgcgccggaagtggcgatcctcggtgtgtccaaggcgaccatgcagccggtatgggacggcaaggccttccagccgcgcctgatgctgccgctgtcgctgtcctacgaccatcgcgtgatcaacggcgccgccgcggcgcgcttcaccaagcgcctgggcgagctgctggcggacatccgcaccctgctcctgtaatacctgcgccgctccccacggagcggccagcccctctcgcgagcatgccacgctcgtctctcggccccaccggatggtggggctttttttgcccgcctgacggctcggcgaaactgcgacccgtcgtaccgccagcgaatgccacaggacccgcaggcgcgagttcggcgcgcacgatgacaggcgctcgacgccaaccctcccggcgaagccaaccctacgaaaaacagggcttttccagcggcgccgcagacctccgaccgtccagcggttttttcccggatacgcttaacttgggccctgccgggccgatacagagttacttgtcagaccaatcggcataatgcaccctttgcctgcaccccatcgaaacgggtcgaggcctccccctcgctcagtacctggaatcagcctcgcatgaaaagtcatcccgatgccgccagccgttcggcggccgaggttgtcacgcagctacccgtgccgtcgcggctcgggctgctgcgtttcgagcggctgaacgagccgagctgggcactgctgttcctcgatcctgcctgcgagcgccagctcgggctgccggcgactaccctctgcgcactgctcgatgcgccttacgccagcctgatggaacccgaggcccgccaccgcctgcacgagcagatccagcagcaactggtgaagcgcccgcactaccaggtgagctacaagctgcacacacccaacggcgtgctgaccatgctggagttcggcgaagccttccagcagcatggccgccagttgctgcacggctacctgatggtcgaggagcgagcggagagcgccgagcgcagcgaacagttgctcgacctggaatcgcagaacctgcgcctgaaggcgtccctggacctctaccagcgctcccaggacgaccacctgcaacacctgctgcgctcgcgcacccagcagaacctgatcgtccgcctggcccgccatcgctacctgtccagcgacccgctgctggaggctgcgcaactgatcacccaggccgcctgcgaagcctacggcaccgcgcgagccggcatctggcggctgctcgacgaccagcgcctggaagcggtgaccgtctaccgccgcgacctcgaccagtacgagaagccccagagcatcgacgccagccgctaccccgcctacctcgaggcggtacacagcgggcgcgccatcgacgcccacaacgcccagcgcgacccacgcacccaggaactctacaaggactacctgaggccgctgggcgtcaacgccctgctcgacgccaccatccgcatcggcggcgaggtggtcggcgtgctgtgcctggaacacgccggcgagaaccgcatgtggcagagcgacgagatcgccttcgccggggaactcgccgaccagtacgcgcaggtcctgatgaaccacgagcgacgcaatgtctccagcgccctgcacctgttccagcgcgcggtggaacagagcgccagcgccttcctgctgatcgaccgcgacggcgtggtggaatacgtcaatccgagcttcacctcgatcacccagtacagcgccgacgaagtgcgtaaccgacgcctgtccgagcttccggcgctggagaacctcagcgagctgctgttcgacgcgcgttccgcgctgacccagcagaacagctggcagggcgagttccgcagccgccgcaagaaccacgagccttactggggccagttgtcgctgtcgaaggtctacgacgatctcggcgagctgacccactacatcggcatctacgaagacatcacgcagaacaagctggcccagcagcacatcgagaaactcgcctaccgcgacaacctcaccggcctggccaaccggcactatttcatcggcgccctcgaggaacgcctggaaagcagcggcgaccgcccgctcagcctgctgctggtggacatcgacaacttcaagcggatcaatgacagcctcggccaccagaccggcgacaagctgctggtcagcctggcccggcgcttgcgcagttgcctcggcgacggcgccaccctggcgcgcttcgccagcaacgagttcgccgtgctgctcgatgacaccgcggtggaaaagggcgaaagcattgccgcgcaggtcctgcacatgctcgacaagccgctgttcgtcgacaaccagttgatcaacatcaccggctccatcggcctggccagcgccccgcagcacggctgcgacccgcagaccctgatgaagtacgccggcctggcgctgcacaaggccaaggccaacggcaagcaccaggtccaggtgttcaccgaggcgctgaccgccgaggccagctacaagctgttcgtcgagagcaacttgcgccgcgccctggcgcagaacgaactggcggtgcactaccagcccaagctgtgcctgcgcagcggccagttgctcggcctggaagccctgctgcgctggcagcatccggaaaaaggcatgatccgcccggaccgcttcatcagcgtggccgaggaaaccgggctgatcgtgccgatcggcaagtgggtgatccgcgaagcctgtcgccaggcccgcgagctggccgaggccgggctgggcgagctgcagatcgccatcaacctgtcgcccaagcagttcaccgacccggacctggtcggctcgatcgcggcgatcctccacgaagagaacatcccggccagccagctggaactggagctcaccgaaagcctgctgctggacgccaccgacgatacccgccagcaactcgaacgcctgaagagcctcggcctgaccctggcgatggacgacttcggcaccggctactcgtcactgagctacctgaagaaattccccatcgacgtgatcaagatcgaccgcagcttcatcaaggacatcccggacagccaggacgacatggaaatcacctcggcggtgatcgccatggcccacaacctcaagctcaaggtagtcgccgaaggcgtggagagcgccgagcaactggccttcctccggcgcaaccgctgcgacatcggccagggctacctgttcgaccggccgatccccagcgacctgctcaataccagtctgctgcgctatccctgccgcaccctgcactgatcgcccaggcctcccccgccggcgcggaaaggctgtactctctgtgctcatccgcgagtcattcgcctaccccctgagcaggagacgagagccatggttctgcgttctgaaatcctcaccaagaaaagcgagctgcccacgccggaccaggccctgccgggtcgcgaaagcgccatgccggtgcccgaagcgcacttcgtcaacggccgcccgctgaccgcgccgttccccgccggcctgcaacaggtgctgttcggcatgggctgcttctggggcgccgagcgtcgcctctggcagcaaccgggtgtctgggtgaccgcggtgggttatgccggcggctacacgccgaacccgacctacgacgaagtctgctccggcctgaccggccacagcgaggtcgtgctggtggtctacaacccgcaggagaccagcttcgaacagctgctcaaggtattctgggaagcccacgacccgacccagggcatgcgccagggcggcgacatcggcacccagtaccgctcggtgatctacaccttcgacgcggcccagaaggccgcggccttggccagccgggagagcttccaggccgaactggcgaaagccggctacgaccgcatcaccaccgagatcgccgacgtcccgcccttctactacgccgaggcctaccaccagcagtacctggcgaagaaccccaacggctactgcggcctgggcggcaccggggtgtgcctgccggcctgacgactattccgccaccagccagtcgagacgccagccgccctggctctgggccatgacctcggccagccagggcagcaggtcgcgcagttcgtcctccagcggccacggcggattgacgatggccagcccggagccgttgaaacgctcggcgtcgtcgatcggatgcacgtgcagctcggcacgcagcagcttcggcgcgacgctacgttccagggcctggtagaagcgcttgagctggcgctcgtccttgatcggataccagatcaccaccaccgtctggcgcatccgcccgatcgcctcgtcgagcgcagcgacacaacgctgcaattcgtcggcctgctcgaacggcggatcgatcagcagcaccgcgcgcttttccggcgccggcaggaacgcccgcggcagcagccaaccgtcgccctggtgcacggcgacccgccgttcgccagccatgttggccttgagcaggcggccgtcctcgggatgcaattcgttgagcagcacgcggtcctgggcgcgggtcaggcgccgcgccagttccggcgagcccgggtagtagcgcagggagccgtccggattcaggtgacggatcacgtccaggtaatcgtccagttgctcgggcaggccttcgcgctcccacaggcgggcgatgccctgctcccactcgccggtgcggctggcctcgtcaccctgcaggtcgtagaggccgaccccggaatggctgtccaggtaggcgtacggcgtgtccttgcgccccagcagggcgaagatccgcgccagcaccaggtgcttgaagacatcggcatggttgccggcgtggtaagcgtgacgatagttcatgatgactgctccttggacagcgccaggcagcgctgctagccggaccgcccggccccggcggtttcgcgccgaccccgcgtcggcacaggccctcgcccatgggcgaggggcgcggattctaccagcctcccgaggcttcggcagcggtctcgccgtcgcaggtttggcccttgtatcacgcatatcgatgttggttggcgaccttcattcaccagcctagactcgctggcaccctggcaccgcctgcgacggtcgatgccttcgccgcgccgccccacgatcccctttcgccgaggtcgtcatgtccgaaaccctgctcagttcccgcaacctagcgttcgagctgtacgaagtcctcgatgccgaagccctgacccagcgcccgcgcttcgccgaacatagccgcgaaaccttcgatgccgccctcggcaccgcgcggagcctggcggaaaagctgttcgccccgcacaaccgcaagggcgacgaacacgagccgctctatgagaatggctcagccacgctgattccggaagtgaagccggcagtggatgccttcctcgacgccggcttcctcaacgccacccgcagcttcgagcaaggcggcatgcagttgccgaccctgctgtcgcaggcctgcttcgcccacttccaggcggccaacgtcggtagctcggcctatccgttcctgaccatgggtgccgccaacctgatcgagagcttcggcagcgaggagcagaagcagcgcttcctgcaaccgatgatcgagggccgcttcttcggcaccatggccctcaccgaaccgcacgccggctcctccctctccgacatccgcacccgcgccgaaccggccgccgacggcagctatcggatcaagggcaacaagatcttcatctccggcggcgaccacccgctctccgagaacatcgtgcatatggtcctggccaagctgccggatgcaccgccgggggtgaaaggcatctcgctgttcatcgtgccgaagttcctggtcaacgccgacggcagcctcgggccgcgcaacgacgtgatcctcgccggcctgttccacaagatgggttatcgcggcaccacctccaccgcgctgaacttcggcgacaacggcgcctgcgtcggctacctggtgggcaagccgcaccacggcctggcctacatgttccagatgatgaacgaggcgcgcatcggcgtcggcatgggcgcggtgatgcttggctatgccggttacctctattcgctggagtacgcccgcgaacgcccgcagggccgcctgccggacggcaaggacccgagcgcgccacaggtggcgatcatccgccacgccgacgtgcggcgcatgctgctgacccagaaggcctatgtcgaaggcgccttcgacctgggcctgtacgccgcgcgcctgttcgacgacagccagaccctggaagacgacgaacagcgccgccaggcccacgacctgctcgacctgctgaccccgatcgtcaagtcctggccctcggagttctgcctgaaggccaacgagctggcgatccagatcctcggcggccacggctacacccgcgaatacccggtggaacagtactaccgcgacaatcgcctgaacccgatccacgaaggcacccacggcatccagtccctcgacctgctgggacgcaaggtcgggcagaacaatggcgccggcctgcgccagctgacccgcctgatccaggacgcctgccggcgcgccgaagcccacccatccctggtcgccctgcgccagccgctggaacggctggtggcgcggctgtccgaggtgaccctggcactgctcggcgacctgatgcagggccaggtcaaccagggcctggccaactcggcgctgtacctgaaagtgttcggccatgcggtgatcggctggcgctggctggagcaggcgatccgcgccgaggaagggctggctcgcggcgactgcgccgacgccgacttctatcgcggcaagttgcaggccgcacgctacttcctgacctgggaagtgcctggctgccaccacgaactggcgctgctggaggcccgcgacgacgtgtgttcgagcatgcaggaagaatggttctgatcctgcctgccctttcccgccccggtcacgtccggggcttttttatgtccgggcatggacgccgggttgccgttgcctggcggccacgccggcgagtccgcgcgcactcgcccggacaacgcgaaagccttggaattccttcgaaaaaaaccgcagccgcccctttacagtccgccaaatccgcaggttagaatcacttggcatgcggcctgcatcctgtctacgtaattcccctacgtaaaaccgacccgtagcgtcgccttccccctgtcccgccgcgaggaggccgaccttggacgccgtcaccgtcaataatttcttcctgatcggggcggtgctggtcggcatgagcatcctcgtcagctcgctgtcctcccgcctgggcatcccgatcctggtgatcttcctcgccgtcggcatgatcgccggcaacgacggggtcggcggcatcgtcttcgacaactatccgatggcctacctggtgggcaacctggcgctcgccgtgatcctcctcgacggcggcctgcgcacccgcgtctccagcttccgcgtggcgctctggccggcattgtcgctggccaccctgggcgtgctggtgaccaccggcctgaccggcatcgcggcagcctggctgttcgacctgcactggatggaaggcctgctgatcggcgccatcgtcggctccaccgatgccgccgcggtgttctccctgctcggcggcaaaggtctcaacgagcgggtcaccgcgaccctggaaatcgaatcgggcagcaacgacccaatggcggtgttcctcaccgtgaccctgatcgagatgctcgccagcggccagaccggcctcagctggggcttcgccctgcacctggtgcagcagttcggtctcggcgccctgctcggtcttggcggcggctggttgctgctgcaactgatcaaccgcatgcacctggccggcggcctctacccgttgctggtgatcagcggtggcctgctggtgttcgccctggccaacgccgtcggcggcagcggcatcctcgccatctacctgtgcggcctgctcctcggcaaccgcccgatccgcagccgccacggcatcctgcacatgctcgacggcatggcctggctggcgcagatcggcatgttcctggtcctcggcctgctggtcacaccccacgacctgtggccgatcgccctgccggcactggccctggcgctgtggatgatcctggtggcacgaccgctgtcggtactgatcggactgatcccgttccgcgccttccacgaccgcgagaaagccttcatcgcctgggtcggcctgcgcggcgcggtgccgatcatcctcgcggtgttcccgctgatggccggcctgccgaacgcccagctgttcttcaacgtggccttcttcatcgtcctggtctcactgctggtgcagggcaccagcctgccctgggcggccaggctgctgcgggtggtggtgccgccggacccggcaccgatatcccgcgccggcctggagatccacccgaccagcgagtgggagctgttcgtctaccacctgaacaaggaaaagtggtgcatcggcgccgccctgcgcgagctgaagatgcccggcgggacccggatcgccgcgctgttccgcggcaccgaactgctccacccgtcgggcagcaccatcctcgaggccgacgacattctctgcgtgatcggccacgaacacgacctgccggccctcggcaagctgttcagccaggcgcccgaccggggcctcggcgcgcgcttcttcggcgacttcgtgctggaaggcgatgcccagctgtcggcggtggcctcgctctacggcctgaagctcgacggcatcgacggcgagcaagcgctgggccgcttcatcgcccacgagatcggcggcgaagcggtgatcggcgaccaggtggagtggaacggcctgacctggaccgtggccgccctggaaggcaaccgtatccgcaaggtcggcgtgaagtttccggaaggccgcccagggcccggacttttcctctgatttcctgtcgaattcccgttccgaggcgccttgcggcgcctcggagccaccactaacctgcattcacccttcttcgagtctcttctcgaccatgcctgcccttcgctccctgatcgctattcttttcctcggcctctgccttgccagtccgccgctcctcgcccagtccgagccgccctcggccgaggccgtccagcaaagcctcgacaagctggccgagcgcaagctcgccgaagccgaccagaaggtcgccaaggccagcctcgaacagaccctcaagttcctcgccgcgcgcgacgaagcgctgcagagcctggaggacctgaaaaagcgcctgagcgacgcgccccggcagatcgaggaaaaccagcgcgaactggagcgcctgaagaagaccaaagaacgtccggtcagcgaacgctacagcggcgagagcgcggcccgcctggaaatgctgctcaacgaccgcaccacccagcaggccgagtggcagaaagccctgggcgaggccaacagcctgtcgatcaccgccgagacccgtccggaacgagcccaggccggcatcagcagcatgcaggcacggatcctggaaatcggctcgctgctcaaggccggcaaggaaagcggcaagacgatcaacgccgaccgtcgcggcgagctgctcgccgagcaggccgcattgaccgtgcagagccagctgttgcgccaggagctggccggcaacaacctgctgcaggacctcggcaagagccagcacgatctgctcaccgagaagatctcgcgcctggaaaaggaaaccctcgacctgcaggcgctgatcagcgagaagcgccgcgagcagtcggaaaagaccgtcgccgagctgtccaaggaaggcgcccagggggccggcaccgacagcctgctgagccaggagaacgccaagaacctgcgtctctccgactacctcctgcgtgccaccgaccgcctcaacgtgctcacccggcgcaacctcgagaccaagcagcaactggacaacctgacccagtccaaccaggccctcgaggaacagatcaacgtcctgcgcggcagcctgctgctgtcgcgcatcctctacaagcagaaacaggcgctgcccaagatcaaggccgaccagagcctggccgacgagatcgccgacctgcgcctcggccagttcgaactgaaccaggaacgcgacaagctggcgaccccgcagcaatacctggacgacctgctcgcccagcagcccagcgagcaggtcacgccggaactgcgcaaggatctcgacaccctgttggcaacccgttccgagttgctcgaacggctcaaccacgaactcaacgcgctgctcaacgaagcgatcaccttgcagttgaaccagaagcagttgctttccaccagcgagagcctgcgcaccaccctcgacgagcagatgttctggattcccagcaaccagccgctcgacctgtcctggttcaagatgaccccgaccctgctgaagaaccagctcaccgagatcccctggggctccggggtgcgtgaactgggcgaaggcctggtcgatcggccgctgctgttcctgccgctgttcctgctgatcgccgcgctgctgtggaaacgccgctacctgtacgacaagctggcggagctgaacgacgacatcggccacttcaagcgcgacagccaactgcataccccgctggcgatcctgatcaccatcctcctcgccctgcccggcaccctgaccttcgccgtcgccgggctggccctgctgctggacgcccgcggccagaacgccaccctcggcagcgccctgctggaaatggcccaggtctggctgctgttctacaccgcccatcgcatcctcaccccgggcggcatcgccgagcggcatttccactggagccgcgaacaggtcggcttcctcgaccggcacctggtccgcctcggcgttgtggtcctggcgctggtcggcgtggtgacggtggccgagcaccagccggcgagtctggccgacgacgtgatcggcatcgccgtggtcctgctgggctacgcggccatggcctggctgctcagccgcctgctgttcagcagccccggtgacgagcgtccgtcgctgatcaagatgatcgtcggcatcctcttcaccgcgctgccgctggtgctcttcgtcgcggtctgcttcggctactactacacctcgctgaagctcaccgaccgtctcatcgataccctttacctgctgctgctctggttcgtcatcgaagccgccttcgtccgcggcctgggcgtggcggcccggcgcctggcctacgcccgggccctggcgaaacggcagaacgcggcgaaggaaggcgtcgacggcgagaccaacgtcgaggagccgaccctcggcatcgagcagatcaaccagcaatcgctgcggctgatccgcctggctctgctgatcggcttcatcgtctgcctgtactgggtctgggccgacctgatcagcgtgatctcctacctcgacaacgtcaccctgtaccagtacaccgccggcaccggcgaagcggccaccagcgtgccgatcagcctgcgcgacttcctcgcggcgctggccatcgcggtggtcaccgtggccctggcgcgcaacctgcccggcctgctggaagtcctggtactgcagcgcctgaccctggcccagggcagcgcctacgccaccaccaccctgctttcctacgccatcagcggcatcggcatcgtcagcgccctgtccaccctcggggtcagctgggacaagctgcaatggctggtggcggcgctctcggtaggcctcggtttcggcctgcaggcgatcttctccaacttcgtctccggcctgatcatcctcttcgagcgtccggtacgaatcggcgacgtggtgaccatcggcaacctgtccggcacggtcagccggatccgcatccgcgccaccaccatcaccgatttcgaccgcaaggagatcatcgtcccgaaccagaccttcatcaccgggcaactggtgaactggtcgctgagcgataccgtgacccgggtcaccatcaagatcggcctggcctacgagaccgacctgccgctggcgcgcaagctgatgatgcaggcggtcaaggaaaacccgcgggtactgcgcgacccggagccgctgctgtacttcctgaccatcagcgccagtaccttcgactacgagctgcgcttccacgtccgcgaactgggcgaccgcaatccctctaccgacgagatcctgacgaagatcgccaccagcttccgcgaacacaagatcgacatggctttcaaccaggtcgatgtgttcgtcaagaacctccagggccagcaggtccagctgttcgtcggcgagccgcagcacagcggcgtcggcaatccgcccgcgctcaagggccaggacggtcccgccgaaccgacccgctgaacctccgggcctggacgccctccggcaattcccagcacaatgctcgggaattgccggaggcctctcttgaaatcactcgacgacctcgacttcgacaaccgcttcgcccgcctgggcgacgccttctccaccgaagtcctgcccgaccccatcgccgagccgcgcctggtggtagccagccccgccgccctggcgctgctcgacctgccagcggaaaccagcgacgaagcgctgttcgccgaactgttcggcgggcacaaactgtggtcggaggccgagccgcgggcgatggtgtattccggccaccagttcggctcctataacccacgcctgggcgacggccgcggcctgctgctcggcgaggtgatcaaccaggtcggcgagcactgggacctgcacctcaagggcgccggccagaccccctactcgcggatgggcgacgggcgcgccgtgctgcgctcgtcgatccgcgagttcctcgcctccgaagcccttccggcactgggcattcccagcagccgggcgctctgcgtgatcggttcgagcacgccggtctggcgcgagaagaaggaaagcgcggcgacgctgctgcgcctggcgcccagccacgtgcgcttcggtcacttcgaatacttctactacacccgccagcacgaccagttgaaacagttggcggcgttcgttctggaacaccacttcgccgactgcaacgcaaccgagcggccatacgcggcgatgttccgccaggtcgtcgagcgcaacgccgaactcatcgcccgctggcaggcctatggcttctgccacggggtgatgaacaccgacaacatgtcgatcctcggcattaccttcgactacgggccctacgccttcctcgacgatttcgacgccaatcacatctgcaatcactccgacgacgccggccgctactccttcagcaaccaggtaccgatcgcccattggaacctggccgccctggcccaggcgctgacgccactggtggaagtggacgaactgcgcgccagcctcgacctgttcctgcccctctaccaggcccactacctcgacctgatgcgccggcgcctgggcctgggcgtcgccgcggagaacgaccaggccctggtccaggaactgttgcagcgcatgcagggcagcgcggtggattactcgctgttcttccgccgactcggcgaagaaactccggagcgggcgctggccagcctgcgcgacgacttcgtcgaccgcgaggccttcgaccgctgggccgaggcctaccgccggcgcgtcgaggaagaaggcggagaccaggagtcgcggcgccggcgcatgcacgcggtcaatccgctctatgtgctgcgcaactacctggcacagcaggccatcgaagcggccgagcagggcgactacacggaagtccgcttgctgcaccaggtactgagtcgcccgttcgaggaacagccgggcatggagcgcttcactcggcgcccgccggactgggggcggcacctggaaatcagttgctcctcctgacgggatgccctgacagaacggcggccgataatgccgcaatggaataaataccttcggaaaacttcttagacgcactaagaaaagccgattatcttcgccgccacacttattccagcctgttctaccacctcctgtcaggcgccttgccgcatgaagatacgcgacctcgatctcagccagagttcgatcaacaccgaacaccaggcgctaggtctgcctcctgtcgaagatttcgtcacccatccggacgaccacccggtactgcgcgccgccatgtgggcggcggtgctgatcctggtcggcctgctcgccttcctggcctggcgcctgttcttcgacaacggcggcagcagcggcttcgagatcatcgagcaggccctgaccagccgaggtttctggagcgcggtggcggtgggcttcttcgcccaggtgatcgacggtgcgctgggcatggcctacggcattactgccaccaccttcctgctcagcgctggcgccacgccggccgccgccagcgccagcgtgcacatcgccgaagtgttcaccaccggcttttccgggatttcccacgtcaagctcggcaacgtcaacaagtcactcttcctccgcctgctgctgccgggaatgatcggcgcggtgctcggcgccgtgctgatcacccgcttcgacggccaccagctcaagcccttcatctccgcctacctgctgctgatgggcctgtacatcctgagcaaggcctaccgccacgtgatcacgcgccgggcaccgcgccacgtggccaagctggcactcttcggcggcttcgtcgatgccgccggcggcggcggctggggcccggtggtcaccagcagcctgatcggctcgggtagcgacccgcgcaccaccatcggctcggtgaacttcgccgagttcttcctgaccatcgccagcgccacctccttcatcctcctcgccggccagccggacacctggaagatggtcgccggactggtcttcggcggcctgttcgccgcgccgttcgccgccctgctgtgcaagaagctttcgccgcgcaccctgctggtcatcgtcggcaccctgatcaccctgatcagcgcctacaacatctacatcggcctgcgctgacaggcataagcggcgaacacaacggtctaaccaggcacgcttttccttgcccgggcgcattgacccgcccggcgcgctttcccatgctgcgtccttccaatctgcccgaaggaacgctgcatgaaactggaaaccctggccgtccacgccggctacagccctgacccgaccacccgcgcggtggcggtgccgatctaccagaccacctcctacgctttcgacgacacccagcatggcgccgacctgttcgacctgaaggtaccgggcaacatctacacacggatcatgaaccccaccaacgatgtactggaacagcgcgtcgcggcgctggaaggcggggtcggggcgctggcggtggcctcggggatggcggctatcacctacgcgatccagaccgtcgccgaggccggcgacaacatcgtctcggtggccaagctctacggcggcacctacaacctgctggcccacaccctgccacgcatcggcatccaggcgcgcttcgccgcccacgacgacatcgccgccctggaagcgctgatcgacgagcggaccaaggccgtgttctgcgaaaccatcggcaacccggcgggcaacatcatcgacctgcaggcactggccgacgccgctcaccgccacggcgtaccgctgatcgtcgacaacacggtagccaccccggtgctctgccggccgttcgagcacggtgccgacatcatcgtgcactcgctgaccaagtacatgggcggccacggcaccagcatcggcgggatcgtggtcgactccggcaaattcgactgggcggcgaacaagtcgcgcttcccgctgctgaacacgcccgatccgtcctaccacggcgtcacctacaccgaggccttcggacccgccgccttcatcggccgctgccgggtggtaccgctgcgcaacatgggcgcggcgctctcgccgttcaacgccttcctcatcctccaaggcctggagaccctggcgctgcgcatggagcgccactgcgacaacgccctcgccgtagcccgctacctgcaacaacatccgcaggtggcctgggtgaaatacgccggcctcgccgacaaccccgagcacgccctggcccggcgctacctggggggccgcccggcggcgatcctgtccttcggcatccagggcggcagcgccgccggcgcgcgcttcatcgacgccttgaggctggtggtgcggctggtcaacatcggcgacgccaagtccctggcctgccacccggcgagcaccacccaccgccagttgaacgcggaggaactggcccgcgccggagtctccgacgacatggtgcggctgtcgatcggcatcgagcacatcgacgacatcctcgccgacctcgaccaggccctggccgccgccgcacgctgagcggatcggtcagtccgggcgagcgtttcggtccttgcccggcctggccggccggctagtctggctgggatccccgacatggagagcgccatgccactgcccaccgaactcgccaggcacctgaccgaagaaaagatcgccttcgtccagcgcagcggactcagggcggaagtcctcgaacccggctacgtgcgcctgcgcatgccgggcgccggcaacgagaaccacatcggcagcatgtacgccggggcgctcttcaccctcgccgaaattcccggtggcgcgctgttcctgaccagcttcgacagcgcccgcttctatcccatcgtcaaggagatgaccttgcgcttccgccgcccggccaagggcgacatacgcgtcgaggcacgcctggatgccgagcgcatccgccaactggaaaccgaggccggggagcgcggcaaggccgaatacagcctcgaactgcaactcaccgacgagcagggggaggtggtggcggaaagcaccgcgctgtaccagctacgcagccacgcgcggccctgactggcagatttcgcagggcccggcgaaggttttttctgccatggatcaaggtccgtagcgagctgcggcgcgacagtggagaagccagcgtagccatcccacggagtccgccatgatccgccacctcctggtcgcccacgacctcaccccggaagccgacgtcgccctcgcccgcgccgcccaactggcccgccagcacgatgcgcgggtcagcctgctgcacgtgtacgacccggggctatcggcgtcagcggtgaagaccgtcagcgccatgctgcagctcaagcgcaaggaggccggcctcgacgaggacagcgccatccacctgttcaggggccagccgatcgacggcatcctgcagcagacccgggcgctcgaaccggacctgttgctgatgggcgcacaccaccagaagaccttcgaacgcttcggcaacaccaccctcgaccaggtggtgcggcgcagccgggtgccggtgctgctcgccgtgcgcgaggcggacgaaccctaccgccaggcgctcagcgccctggacttttcccagtgcgcctgtaccgcgctgcgccaggcctaccgcctgctgccggtggaagccgacctgcacgccctgcacgtgttcgagtcccccgacgacagcgtgctcggcctgcccaggcagaatgccgcgcacctggccacccaggccgggctgatcgaacaattgctgagcgacgagcaggagcgcctgccgggcgtcgggccgcagctgagccacgaagtggttcccggcgtgctgccgtacagcctggacgccgcgttgaagcagcgccagccggagctgctcgccctcggccggcacagccgcaacgcgctgatgcaggcgctgctcggcaacctggcgcaacgttacctgcgccagccgagctgtgacgtcctggttacctcgtagaagcgctgccgcagaggctgctcagctttcgagaagcccgtgcaactcgacgaactgctgggtcaacttgtgccgcggttcgaggaagatcagcggggtgcaagcctggtgcgactcgcgcatcttcaccgagctcatcaggtacaccggcagcaccggcagttcctccgccaccagctcgtcgagcagttgctgcggcaggctggcgcgcggctggaactggttgaccacgatgccctcgacctgcaggtcttcgttgtggtcgtcgcgcagttcctcgatctcctggagaaggccatacagcgcctggcgggagaagctgtcgcaatcgaaggggatcaggcagcgatcggcagcgatcagcgcagataccgtgtagaaattcagtgccggcggggtatccaggtagatccggtcgtagtcttcgtccagttcgtccagcagtttgcgcagcttgttgatcttgtgcttcgactccagcttcggctgcaggtcggccagttcggggctggaggtgacgatgtgcaggttgtcgaacggcgtctcgtagatctcgaccctgcccttcttgctgaagggcccggaagacaaggtctgcttgaagaagtcggcgatccccaccggcaggtcctcgccggtcagtccggtcaggtagtgcgtggagttggcctgggcgtccaggtccaccagcagggtgcgatagccctccgccgcgctgaccgccgccaggttgcaggcgatgctggacttgcctaccccgcctttctgattgaacaccacgcgccgcatgggaaatctccgtgagccgagcctgatcccggatgataggcaaagccgcgggcaagcgcgagcgccgtctcggtcctgacgtagagcggttcagcgccggcgcaggctggccgcctcacgggtcaccaggtcgatgaaggacagcgccagcggcgagccctcgttctgccgacggaccagccataccgcagtcgtcgcctcgggatcgctcagggtgcggtagaccacgccgtcgacccgggtgcggcggaacgacgccggcaggatcgacacccccagtccggccgagaccaggccgatgatggtcatcgcctcgctggcctcctgggcgatgcgcgggctgaagccggcctgtcgggtcagggcgatgacctggtcgtagagcccggtgccgtagctgcgcgggaagaacacgaagggctcctcggccagggcggcgatggccaggccatcctcgctgccggccgccagcggatggtcggcccgcagcaccgccaccagcggttcgcggaacaactccacccaatgcaccgcatccggcagcgccagtgggcggatcacgcccacctgcaggctttcctcgagcagcgccttgagtacctggcggctgctcatttcctgcaggtcgaggtgtacgtccggataggccttgcggaaggcatggatgctgctgggtatggtcgaggtgaagggtgccgaggaagtgaaaccgatcttcagctcgcccagttcccccaggtgggcccgacgcgccagcaacaccgccttgtctacctgggccagcacctggcgggactcgtcgaggaacagccggccggcgtcggtgagttcgacgcggcggttggtgcgctcgaacaggcgcgcaccgatttcctcctccagcgcctggatctgctggctcaacggcggctgggagatccccaggcgctcggcggcgcggccgaagtgcagctcctcggcgacggcgatgaaatagcgcaggtgcctgagttccacgcggcccctccaattaggtctttttacatatcaatcgtgtcgatcaatatattggaaatcatataaacctatctatatcctttgccacataacctccaacaacgaccccttgtccctgaaatccaggtggcgcggcctcgttgtgcctgctcgccaccgtccccagaggtgccccgtgagcaatccgcaagtccggccacaggccgaagaagaacccgcgttaatcgaggcggcccgcgaagcagccaacgaggtgctggaagccgccaccgaagtcgaacgctatatcgagaaaggcaccccgcagttcatgcgcacctccctggcgctgttctccggcggtttcgccacctttgccctgctctactgcatccagccgatgatgccggtgctgtccaaggcgttttccatcagcgccgcggaaagcagcctggcattgtccgtcgccaccgccatgctcgcccttggcctgctggtcaccggcccgatctccgacgcgatcggtcgcaagccggtgatggtcgtctcgctgctggccgccgcgctgttcaccctcggcagcgcggtgatgcccacctggcatggcgtgctgctgatgcgcgcgctggtcgggctgtccttgagcggcctggccgcggtggcgatgacctatctcagcgaagagatccatccgcagcacatcggcctgtcgatgggcctgtacatcggcggcaacgccatcggcgggatgagcggacgcctgatcagcggcgtcctggtcgatttcatctcctggcatgccgcactggcggtcctcggcggcctggccctggtcgccgcgctggtgttctggcgcgtgctgcccgaatcgaaacacttccggccggcaccgctgaagccggcgaccctgctcaacggctaccgcctgcacttccgcgacgccggactgccctggctgttcctgatcggcttcctgctgatgggcagcttcgtcaccctgttcaactacatcggctaccgcctgctggccgagccctaccacatgagccaggcggtggtcggcgtgctctcggtggtttacctctcgggcatctacagctcggcctgggtcggttcgctggccgacaagctggggcgacgcaaggtgctctgggcggtcatcctgctgatgctcggcggcctgctgctgaccctgttcgagccgatcccgctgatgctcgccggcctgctgctgttcaccttcggcttcttcggcgcgcactcggtggcgagcagctggatcgggcgccgcgccctgcgcgccaagggccaggcctcgtcgctctacctgttcagctactacgtcggctcaagcctggccggcaccctcggcggggtgttctggcattactacggctggaacggcatcggactgttcatcggctcgctgctggtggtcgcggtattggtctcgctgcacctggcgcgcctgccggccctgcctggcaacaccctggcgcaggccgcccactgagttcgaggcgccggtctcccggcgccttcactccgaccagaagcgtactccggtcagttcttccgatagcacccacagccgcgcggccagccccaggtcgcgcgcattccgcggaatccgcgccgccgccggataaccgcgggtttccagccagcgatccgggccgacataggcgccgccataccagcgctgttcggtcagcgcggaaagtgccggcaacgcccccatctccgccgattgcgcgaacgctccgttggccaccttcatcgcccagcgtcccaggcgcgaaccggacatcgccggtgccgcgtactgcaggttggtcgccgcgtagcccggatgcgccgccaggctctgcagaagcacgccccgctggccggcgcggcgctgcaactccaggctgaacagcagattggcctgcttgctgtggcaataggcgagatagcggttgtagccgcgctcggcgttgaggtcgtcgagcggcagccggccgaactggttgaaaccgctggtcatgcccaccaccctgggccgtggagcggccagcaacgactccagcagcagtcccgtaagggcgaagtggccgaggtgattggtgcccatctgcatctcgaaaccgtcgcgggtacgccgcaggggcaggaacatcactccggcgttgttgaacaagagatcgaggcgtgcgtggcgctgacggaaaccggcggcgcaggcgcggatcgaggcgaggtcggccaggtcgagatcggccagctccaggcgtgcctggggatactcgtcgaggatcgcccgccgcgcccgctccgcctgttcgcgattgcggcaggccatcaccacggtcgcccctttgccggccagcgtgcgcgccgcctgccaacccaggccgctgttggcgccggtgaccagcgccaggcgcccggccagttgtggaatgttgcgtcgtgcccagggatgcatcgctcgttctccgcttgactgcgttgccgggcagtattgcggcaccagccaatgcagcggcagacgcgctcgcgccagactgccgatcatttcgggccaggacacgccagcatgagccgccgcacggactccgacgcaccgaccatcaccgccgcctacccgcgcctgctgctcggcctgctggaggaacgcggcctggacggacgcgcgctgctacgggaaatcggtctgtcgacgctgcgactggaagagccggaagcacgcgtcacatcgcagcagtaccaggcgatcgccgccgcggcgctcgcgctgagcggcgaccccggcctcggcgcacagctcgccttgcgcacgcctcccaccgcccatggcagcctgggctacgcgatgatggcctcggcgacgctcggcgatgccttgtgcctggcgctgcgctacatgccgctgctgcagggcaacgtcgaaatcagcctgctgcgcgaggacgagcaggtgatcctgcgcctgctgccaggccctgcgctcccgccggcgctgcaccggtacttcagcgaagccctgctgatcggcctgtatcgctccggcgcctggctgctcggcgaaccggccctggtcggcaggctcgacttcgactaccccgaacctgccgtgcctgtgccgctgccgcagtgccgctacgaccaggcccacgtccagttggtgttccccgccatcctgctcgcccgctcgctaccgatggccgatccggctgcgttgcgccgcgcccgcgaacactgcgagcgcgaactggcgctgctcgatgccggccgccgggacatctgcgcccgcgtgcggctggagctggaacgccaggaacagcgcttccccaacctggaggaagtagccgcgcgcctgcacctgtccagccgcagcctcaagcggcatctgcatgacgccggcaccagctttcgccagttgctcggtcaggctcgccagcgccaggccttgcgattgctgcggcgtcccgaggtgtcgttgcagcgtatcgccctgtacctgggttacagcgatccaaccaacttcacccgcgccttcaagcgctggaccggcgagccgccgagcgacacccgcgcccgcctgctgggcgggcaaccagtttcacgaacaaatgccaagcgctcgacaaatccctcgcgtttcccttgagcgcggcaagcgctgttctatgctgctgcggccggcatccggccggcctcgacagcgatatgaaagggactttatgaaaccagcgatcaagcgcgcctgcctgctcggcacggcactgttctccctctgcgccagcgcagcccaggcggccggcgttctggtaggaacctgggacctgcggggcaacggccagctcgccgcggtctaccgcgacggcgccaacctgcaggtggtggaaggcggcagcacccgcaactacagcttcggcaacgtggtctggtcggtcttcggcgccaccgataccgacggccagcccggcgcggaaatcctggtcaaggccggtcccgacctggtgatcgtttcccacgccagcaccacccagcgcaagtacccggtaggcaacgtctcctgggcgatcatgcgcgccaccgacgtcgacaacgtcgccggcgacgaagtcatcctcagcatcggcaacggcgtgcgcaccgtattcgatcgcacccgtacgcaacgcgacgccaccttcagctacaacggcacctggggcctgttcgacgtcgccgacgtggacggcgcgccgggcaaggaactggtgctgaacatgggcaacggcgtcaaggtcatcgacccgcgcaccggtggcgccaaggacttcaccttcagcggctaccacgcgctcgcacagatcgccgacctcgacggccagcccggcgcggagatcatcggccgcaccagcaccggcatctacgtgatcagcaacgccagttcccgcaaggaatacaacatcggcgccagcgcctgggcactctatggcggcaccgcggacaccgacggcaagccgggcaacgagctgatcgtggtgatgcagggcaaggtgcgggtcatccaccacgccagcggcgccagcagcgactaccgcatcggcgacgtcaactacagcatcgattcggtggccgacatggatggccagccgggcgcggaaatcctcgtgcgcgacgccaacggcaagctgttcgtgatcaacgaccgcaccggcaaggtaagcagttgagccgggcgggttgcgtagggcgggtacgccaccggcgcgaccccgccagccaacgcgccggagggccgtcggcccgcgcatgaaaaaaggggagcctcggctccccttctttcgttccggctcagccgtggtactgcgccgacagctcgtgcaccgcctcgaagaaggcgccggcatgggccgggtcgacttccggggtgatgccgtggccaagattgaacacatgccccgtacccttgccgtaggccgccaggatccgcgcgacttcggcgcggatcgccgccggattggcgtagagcaccgagggatccatgttgccttgcagggctacgcgctcaccgacacgggcccgggcgctgccgatgtcgcaggtccagtccaggcccagcgcctcggcgccgacctcggccatcgactccagccacaggccgcctcccttggtgaagaggatcaccggcacccggcgtccgtcgtgctcgcggatcaatccatcgacgatcttgcgcatgtaggtcagggagaactcctggtaggccgccgccgacaagctgccgccccatgagtcgaagatctgcaccgcctgggcgccggcgtggatctgcccgttgaggtagctggtcaccgattgcgccagcttgtccagcagagcgtgcatggcctgagggttgtcgtagagcatcgccttggacttgcggaagtccttgctcgagccgccctcgaccatgtaggtggcgagggtccaggggctgccggagaagccgatcagcggtacgcggccgttcagctcgcggcggatggtgcgcacggcatccataacatagcccaggtcctgttccggatcgggaaccggcagcgcctcgatgtcggccagcgacgagaccaccttgcggaagcgcgggccttcgccggtctcgaagtacaggccctggcccatggcatcgggaatggtcaggatatcggagaagaggatcgcggcgtccagctgcgggtaacggtccagcggctgcagggtcacttcgcaggccagctccgggttcatgcacaggttcatgaaatcgccggccttggcacgggtggcacggtattccggcaggtaacgaccagcctggcgcatcatccagacgggggtgacatcgacgggctgcttgagcagggcgcggaggaagcggtcgttcttcagggcagtcataacggcatccgatcaaaggctgctggcttcacgcgggcgcgtgcggaagggggttatccacaggccggcgggcgaaaagggccgctattgtcgcaaagcacaaaacaaaaggcacggcgggggccgtgccttttgtctatcgcggtgatttgtcgcagcgccggtggcgccgcggatcagacgccaaggtagtcgaggatgccttcggccgcggtacgtccttcgaagatcgccgtcaccaccaggtcggaaccacggaccatgtcgccaccggcgaagatcttcgggttgctggtctggtgcttgaactgcgcctgcgccggagccaccacgcggccctggctgtcggtggcgatctcgaagcgctcgaaccacggcgccggactcggccggaagccgaaggcgatcagcacggcttccgccgggatgatctcctcggaaccggggatcggttcggggctgcggcggccgcgggcgtccggctcgccgaggcgggtctcgaccaccttcacgccctccacccggtcctcgccgacgatggcgatgggctggcggttgaagaggaacttcacgccctcttccttggcgttcttcacttccttgcgcgaacccggcatgttttcttcgtcacggcgataggcacaggtcaccgacttggcgccctggcggatcgaagtgcggttgcagtccatcgcggtgtcgccgccgcccaggaccaccacgcgcttgcccttcatgtcgacgaagtcctcggccgacttctcgaagccgaggttgcggttcacgttggcgatcaggaagtccagggcgtcgtgtacgcccggcaggtcctcgccggggaaaccgcccttcatgtaggtgtaggtgcccatccccatgaacacggcatcgtactcatcgagcaactgctccatggtcacgtccttgccgatctcggtgttcaggcggaactcgatgcccatgccggtgaacacctcgcggcgacggctgaggacgtgcttctccagcttgaactcgggaatgccgaaggtcagcaggccgccgatctccgggttgcggtcgaacaccaccggggtcacgccgttgcggaccagcacgtcggcgcagccgaggccggccgggccggcgccgatcaccgcgacgcgcctgccggtcggcttgaccttggacaggtccggacgccagcccatggcgaaggccgtatcggtgatgtacttctccaccgagccgatggtcaccgcgccaaaaccgtcgttgagggtgcaggcgccctcgcagaggcgatcctgcgggcagacccggccgcagacttccggcagggtgttggtctggtgcgacagttcggcggcggccaggatattgccttcggaaaccagcttcagccagttagggatgaagttgtgcaccgggcatttccactcgcagtacgggttgccgcagcccaggcagcggtgggcctggtcggcggcctgctgcggcttgaacaggtcgtggatctccacgaactcgcgcttgcgctggcgcagcagcttcttcttcgggtccttgcgcccgacttcgatgaactggaagtcgttgttcaggcggtcggaattcagacgttcagacatatcgaaacctcatcacaacttcgggcgcttattgcgggttggcacgggtgctggtcagcagcgaaccgaggctggccgccttcggtttcaccagccagaaccgacgcaggtagtcatccaggttttccaggatgttcgcgccccactcgcttgccgtttcgttcacgtactcgaccaggaccttgcgcaggtggctgcgataggcctccatcgcctcgccgctgatccgctggatttccaccagctcgtggttcacgcggtcgacgaaagtgttgtccatgtcgaggacgtaggcgaagcccccggtcatgccggagccgaagttgtagccggtcttgcccagcacgcagacgaaaccgccggtcatgtattcgcagcagtggtcgccggtaccttccaccaccgcatgggaaccggagttgcgcacggcgaagcgctcgccggcggttccggcggcgaacagcttgccgccggtggcgccgtacaggcaggtgttgccgacgatggccgattcctgggtcttgaacggactgcccttgggcggggtgatcaccagcttgccgccggtcatgcccttgcctacgtagtcgttggcgtcgccttccaggtacaggtgcaggccaccggcgttccacacgccgaagctctgtcccgcggtgcccttgaaacggaacaccaccggtgccttggccatgccctggttgccgtgcaggcgggcgatctcgccggatacccgcgcgccgatggatcggtcgcagttgcagatgtccagctcgtactcgccgccgctcaggccttcgatggcggccttcgacagctcgaccatcttctcggccagcaggccctggtcgaacggcgggtttttctccacctcgcagaactgcggcttgtcggccgggatcagctcactgcccagcaacggagcgagatccaggttctgctgcttggcggtctcgccggggaggatctccagcaggtcggtgcggccgatcagctcgcccaggctgcgcacgccgaggcgcgccagccactcgcgggtttccgtggcgatgaaggtgaagaagttgatcaccatcgcggtggtgccgatgaagtggtccttgcgcaacttgtcgttctgcgtcgccacgccggtggcgcagttgttcagatggcagatgcgcaggtacttgcagcccagggcgatcatcggcgcggtgccgaagccgaagctctcggcgccgagaatggccgccttgatcacgtccaggccggtcttcaggccgccatcggtctgcacccggaccttgccgcgcaggtcgttgccgcgcagggtctggtgggtttccgccaggcccagttcccagggcgagccggcgtacttgatcgaggtgatcggcgaggcgccggtaccgccgtcgtagccggagatggtgatcaggtccgcataggccttggccacgccggcggcgatggtgccgacgcccggctcggataccagcttcaccgataccagcgcctgcgggttgacctgcttgaggtcgaagatcagctgcgccaggtcttcgatggagtagatgtcgtggtgcggcggcggcgagatcagggtcacgccgggcaccgcatagcgcaggcgggcgatcaggccgttgaccttgccgcccggcaactggccgccctcgccgggcttggcgccctgggccaccttgatctgcaggacctcggcgttgaccaggtattccggggtcacgccgaagcggccggtagccacctgcttgatcttcgaactcttcagcgtgccgtagcgcgccgggtcctcgccgccctcgccggagttggagcgaccgcccagggtgttcatcgcctcggccagcgcctcgtgggcctccggcgacagcgcgccgagggaaatcccggcggcatcgaagcgcttgaagatggcttccagcggctccacctcgtcgagcgccagcggctgcgcggcggtcttcacctgcaacaggtcgcggatcatcgacactgggcgctggtccaccagcgcggtgtattccttgaacttctcgtagtcgccctgctgcacggcagcctgcagggtattcaccacatccgggttgtaggcgtggtattcgccgccatagacgaatttcagcaagccgccctgctggatcggcttgcggttgctccaggcctcggcggccaggagcttctgctcgttctcgatatcgacgaagcgcgcgccctggatgcggctggcgactccggtgaagcacaggtcggtgacctcgtcggacaggcccaccgcctcgaacagctgcgcgccacggtaggacgcgacggtggagatgcccatcttcgagagaatcttcatcaggcccttggagatccccttgcggtagtacttgaacacctcgtagaggtcgcccagcacttcaccggtgcggatcaggtcggccagcacctcgtaggcgaggaacggatagaccgccgaggcgccgaagccgatcagcaccgcgaaatggtgcggatcgcgggcggtggcggtctccaccaggatgttggagtcgcagcgcagcccggtctgcaccaggcggtgatgcaccgcaccgacggccagggcagcatgcaccggcagtttgccgggagcgatatggcggtcgctgaggatcagcagcaccttgccgccgcgcacggcctcctcggcctggtcggcgatgttgcgcaccgcggcctccaggcccatcgactcgtcgtagttgaggtcgatgaagtggcggtcgaagcccgggcggtccagggtcatgatggtccgccacttcgccggcgagatcaccggagtggtgaggatcgcctggttggcatggtgcggggcttcctcgaagatgttctgctcgacgcccaggcaggtttccagggacatcacgatggcttcgcgcagcgggtcgatcggcgggttggtgacctgggcgaattgctggcggaagtaatcgtacggagagcggatgcgccgggagaggatcgccatcggcgtatcgtcgcccatggagcccaccgcttcctggccctgctcgccgagcggacgcagcacctggtcacgctcctcgaaggtgacctggaacatcttcatgaattgcttgagctggtcggcgtcgtagctggccacgccatggtcgtcgtccagggtcgcctggatgcgcagggcattctgccgcagccactgcttgtagggatggcgcgacttcaggcggttgtcgatgtcgtcgctgtgcaggacctggccggtctcggtgtccaccgcgaggatctgccccgggccgacgcgacccttggcgatgacgtcctcgggcttgtagtcccagacgccgatttccgaggccagggtgatgtagccgttcttcgtggtgacccagcgcgacgggcgcaggccattgcggtcgagcaggcagacggcatagcgaccatcggtcagcacgacgccggcggggccatcccagggctccatgtgcagcgagttgtactcgtagaacgcgcgcaggtcggcgtccatggtttcgacgttctgccaggccggcgggatgatcatgcgcaggccgcggaacaggtccatgccgccggtgaccatcagttcgagcatgttgtccatgctcgacgagtcggagccgacgcggttcaccagcgggccgagctcttccaggtcggggatcagttcgttggtgaacttggtccgccgcgcctgggcccagttgcggttgccggtgatggtgttgatctcgccgttgtgggcgaggaagcggaacggctgcgccagcggccatttcggcagggtgttggtggagaagcgctggtggaatacgcagatcgcggtctgcaggcgctcgtcgccaaggtccggatagaaggcggccaggtcggccggcatcatcaggcccttgtagatgatggtcttgtgcgaaaagctgcagatgtagtggtcgctgtcggcggcgttggccaccgacgagcggcgccgtgcgctgaacagcttgatggcgaagtcctggtcgctcaggccggcgccgccgatgaacacctgttcgatctgcggcaggcgctccagcgccaggcggccgagaacgctggtatcgatcggcaccttgcgccagccgaccagctccagtccggcggcgacgatctcgcgattcatgttctcgcgtgccgcctcggctttcaccgggtcctggttgaagaacaccatgcccaccgcgtattgctcgggcaggtcgacagaaaaggcttccctggcgacggcacgcaggaacaggtcgggcttctggatcagcagcccgcagccgtccccggtcttgccatcggcattgatcccaccgcggtgggtcatgcaggtcagtgcttcgattgcggtttgcagaagttgatggctcggctcgccctgcatatgggcgatcaggccaaatccgcagttatccttgaacgtttcaggatggtacagacctgctttcataaggaactctcaccggcaaaacttttttagtcatctacttcgcctgtcacccgctcatgcggcgagttttcgacaggcaaagggaggccattgtacataggtgcacaaggcctcacaaattttgcggcgagaaaatgaaattcaatgtcgccaaaatgaaagacgaaacccgccggtcatgctaacgactagcgagtttcgtcaagaggcgacggcaggtcggatcaatgcgcctggccgatctcctgctggatgctggcgaaggtacgcggccacggcttgccggcctgcaccttggacggcagttttttcactgcggccagggcggcggcacggttcgggaagctgccataggtgacgacgtagaacggcttgccttgcagggttttcttgaagtagcggaaatcgccgccgccctgctggcgaatgaacgcctgggcattggcttcggagccggtaccgaggatctgcagggcgaagttaccaccagactggttgcgataccactgacttcccgcaccgccaccgctggccggcttggcggccggagccggggccggcttcgccgcggcggtggtggccggcttgctcgccgccggcttggccggagcgggggccggggccggcttgctggccggggcgctggcgaccggcgcggccggtgccggggtctgcgccggagtcggggtcgccgcaggcgcggtcggttcggtcggcgccggcggcaccggatgcatcggcgtgacgccgttgttggccagcggcgtcaccggaggagccgagctggaaacggtaggcggcaccgcggcggacggcaggccgccttcgtcgtcgccaccttgcccggcggcctgggccagcggctcgcgaatgaccggctgcgactcgccgaccaacggtagcggcaacggctggctggagccgttgaactccacggccgggccgctgcccggctgctgggcctgggccggcgtaccaccattcatggacaattcggtagaggcggtctgcggcgcctccggcttgctcttgccttgcatgaaccaggcggcgatcacgccgatggccacgaccgcaagaatcaccagatgcttcttgggcaagttgaaagaccctccggttgccttgcgcgctgcgccacgattggccagcatcgcttcgatcagggcatcgcgggcgacctggttgatcgctcccggccagccttccgactgctcgtggatgtccaccagcaggtcgttggaaatcagctcgatgccctgcccggcgccctcgagacgctgggccaggtagtcgcgggtttcctcttcgctgtatggctgcaattcgatggcatggaagcgctcctcaccctcggaaaacacctccaggcgcggcagcaacgacggctcaccgaacaggaatacatgcaggcgtccctcgttggtgccggaagccagcagcaacagcacttccagcgcgctgtcctggagctgctcggcatcgtccaccatcaggtagacgtcctgcccggtgatcgccagctgcgccaccttggtcaggatcgcctccaggctcgcctggttgatgctcaggccctgcgccacctggcgcagcaacgaagtctcgtcggcggcggtgcgcgccgagatcaccacgctgaggaccgcatccttgttggtgctggccaccagcgcctggcgcagcagggtcttgccgctgcccaggggcccggtgaccagcagcaggagctggctgtagcgggccagatggtgcaactggccgagcaccggcttgcgctgcgccgggaagaacttgaaacccggaacgcgcggcgcgaacgggtcgtgactgaattggtagtggcccaggaaggcctcatcggcatgcaagctggtcatgggacctcattcatctccaagctggtcggccaaggcccgatagtcggtgcgcagggtcgcgtccaagatctcacggggaaaatcgccggtgaccacggcattccccagtccttgcagcaaaaccagacgcaggcggccatcgagcactttcttgtcgacggccatgtgttccataaaatcttccgccgtcatctcggccggcggtaccacgggcaggccagcccggcgcagcagacggataccgcgatcgcgctcggcggcgctcagccaacccaaccgatgcgacatctcgagtgccatcacggttcccgcccctaccgcttcgccgtgcaaccagacgccgtaaccctgctgggtctcgatcgcgtgaccgaaggtatggccgaggttcagcgtggcacgcacgcccgactcgcgctcgtcggcgcccaccacgcgggccttcgccgcgcaagagcgctcgatggcctcggtgacaacggtcggctccagtgccagcaaggcatccatgtgctcttccagccaggtgatgaacggttcgtcgcaaatgaaaccgtacttgatcacctccgccagcccggcggacagctcgcgggacggcagcgtcttcagcgacgcggtgtcgatgaccaccgcctggggctggtagaacgcaccgatcatattcttgcccaacggatggttgatcccggtcttgccgcccaccgaggagtcgacctgggacaacagggtggtcggcacctggatgaagttgaccccacgctggtagcaggccgcggcgaaaccggccatgtcaccgatgacgccgccgcccagggcgatcagggtagtcttgcggtcatgccgctccttcagcagagcatcgaagatcagttgcagggtttcccactgcttgtaggcctcgccgtcgggcagcaccacaggggtgacatcgtggccttgcagtgccttgagcagggtttccagatagagaggagcgaccgtttcgttgctgatcaccgcgacccggcgaccgacgatatgcggcgcgaaccagcgggcgtcgcccagcaggttttcaccgatgtaaatgggatagctacgctcgcctagatcgacgtgaagtgtgcgcatgaggcccccagacaggaaagggcaataggataacgcaattcgccgcgcctcagcggggcggcaacttgcgcaggcgttcgagaatttcctggacgaccagacgcggcggcctttcgtcggtctccaccaccacatcggcgatttcgcggtagagcggatcgcgcagcgccatcaggtcgcggaggatctgtcccgggttgggcttctgcaacaaggggcggttgcggtcccgcgccgtgcgcgcgatctggtgctcgaccgaggcatgcaggtacacaacccggccaccggcgcgcagcacctggcggttaccgtcgcgcatcaccgccccgccgccggtggcgatcaccatgccgtcggcggcgcagagttcggtgagcatggcctgctcgcgctcgcggaaaccgacctcgccctcgacatcgaagatccatgggatattcgcgccgcaccgctgttcgatctccttgtcggagtccttgaacgcgagatgcagctccttggcgagcaggcgcccgatggtgctctttccagcacccatcgggccgacgaggatcaggttgaccacgttgttcgatatcagcgaccgattgcgatggcctgattattcatgatccgcggtgtcaggaaaaccagaagttcgtttttcgtgtcggagaccgtatcgcggcggaacaaacggcccaagtaaggcaggtcaccgaggaagggtaccttgtcgacagcctttgtctgggtgttgctgaatacaccgccgataacgatggtttcaccatcgttgaccagaatcttggcgttaacctcgttcttgttgatcggaggaactccattcaaagcattctggaagtcgggagcatccttggtcaccttcacctcaacgatgatccgattgtctggagtgatctgcggcgtcacctccagagaaagagcggcctccttgaacgaggtgctggtcgcaccactggaactggcctcctgatatgggatctccgatccctttaggatcttcgcggtttccttgtcagaagttacgaccttgggttgcgaaaccacttcgccgttcccggttttctccatggccgataattgcaagtcaagaatgatgttatcggtgataaagccaataccgataccggaagtagcatccttggcccccatatccacaaatggggtcggagaattatctctggtcgggaacgtacactgcccctggaacggcccgcagttgtaaccttccttatccttgatgcccatgttgccgttcttgccgtagctgttccagttgccattgtggtaggcaccaccccaacgcacaccaagactcttgtcgtaccccacgttggcctcgacaatacgggcctcgatcatcacctgacgaaccgggatgtccaactgggaaacgattcggcgtagctcgtccagccgctcctgcggctgataggcaatgatgctgttggtacggtcatctacggtaatcgaaccacgagaattttctttctcttcgccactactagtaaccgactggaacagcttggcaatgtccgcggccttggcgtagttcacctggatcagttcccgacgcagtggcgccaactcagcgatctgcttctgcgcttccagctcctggcgctcacgggcggcgatctcgtcggccggggccaccagcagcacgttgccgagcttgcgcttgtccaggcccttggtcttcagcaccaggtccagcgcctggtcccacggcacgttctgcaggcgcagggtgatattgccctgcacggtatcagaggccaccaggttcaggtcggtgaagtcggcgatcagctgcagtaccgaacgcacgtcgatgtcctggaagttcagcgacagcttctcgccggtataggcgaaattgtccttcttgcgccgctcggcgtcttccatggtcatcggtttgatgctgacggtcaggcgattgtcggtctggtagaccaggtagtcgtagagcccgctcggctcgatggtgatgctggtacggtcggattgcgcgctggcgttgacgaactgcaccggcgtggcgaagtccttgacgtccaggcgaacccgcagcgcatccggcagctgggtcttggcgaagtccaggcggatcttgccgccctgttcttgaatatccgggctcaaggtcgggtcggacaggtcgatgaccacgttgccctcgcccttttcgccacgctggaaatcgatgttgcggatggcacgacccgccggcacgtacggcttgggcttgatcggctgggcatagctggccggagccgggcttgccttgaccggagcggcggaagcgacgctggcgccagccggcgaattgccgaccaccacgaagaggttgttgccttccacccgggtggtgtaggacgacagcgtggtcaggttgatgatcaaccgcgtgcgatccttcgcctcgaccaccgtgacgctgcgcgtattgcccacgctcaactcgcggttcttggtgccgagcttgttctgcacccccggcagatcgagggcgattcgcgccggctgctcgatggtatagccacgcggcgcggcgacgggctcgtcgaactgcaactttagctcgacccggtctccaggcagtgccgccacgtcgagtttctccaggtccgcggcgagcaacgccggcgcgaacatggcggccagcaaagcgatcccgaggcgcgagaggccactgttcatcgtccgactccgttgtacagactgctgttggttatgcatgtttttccccgccctcaggagcgttccttgagagtcaggctgcgcggacgctccagccagttcccctctccgtcaggaacgatttcaatcacgtctatttttccttcgctgatgccgacgaccttgccatcgttgcgccccaggtagtccccgaccctcacccgatgcacgccacccgcgcccttcaccaaggcgaaggtaccctgggcgttggacagtgtgccgaccatctcgaaggtttcgatgttgaaaccttccaggaattgcttgacccgtgtctcgtcgggtttaaccaccttattgcctttctgccgcacggtcaggtcgatcttcaccggcggctggaacggactacgcaggttcgaagcgctataagtaaaagcttcatatggctgaaacttcggcagaggctcgatattgcccttaggtcgagcacgtacctcgttcatataggcttgaagatcgccgaactcggaattcgcgccgcaaccggcaagcatggtgagcagcaagctgctcagaatcaggcgggctctcatttcttcagccccttgtcgttgtagcggtaggtcttggccaggatgctcatgcgcagcttcgaggtgttatcgggcgaagccggcttgatctcgaagtcatgcagggtaacgatccgcggcaggctggacacgccgctgacgaaggtcgccaggtcgtggtagccgccgaccacgctgatctggatcggcagctcgatatagaactgctgagtgacttcagggagcagcttgatctcctcgaactccaggccgctgcccagaccggtacgagtgatgtcctcgagcagcccgggtacctcggtgtcgctgggcaactgccgcagcaaggcgccgaaggactcctccatctctttcatctgtgccttgtaggcttccaggttcgcggcctggaacgctttggtagcaaattgctgcttgagcgattcttcttgcgcagcctgctgttcgagctgtgtttgcaagtcacggagatggaagttgtagcccagcgccaggaccgccgcggtcagcagcacgcagacgatgaccttgaccgccgccggccaggaaccgatgttgttcagatcgaggtcgtttacgtcgatcttgcgcagactttccagggaactggccagactcatttcttggctccttgcgcaaccccatgcttcgccttggcgtcttcctcgccgggctgcgtctgctgcacggtcagttggaacacgttggcctggtccaccgcgccctgggtcaccgccttgacctcgttcagggtcggggcggtcagccactcggacgcgtccatgttgcgcatgagattggaaacgcggttgttggactcggccgcgccggcgatggcgatgttcttgccggtcatcttcaggtcggtgaaatacacaccgtcaggcaaggtgcgcaccagttggtcgaacacccgaccaatgatcgggcggttgccctgcaggtcctgaatgatcttcatccgctcgagcaactgctggcgccgcgatctcaactcgctgatttccttgatccgcgcatccagcacaacgatctccttgcgcaggaagtcgttgcgcgcgccctgatgctcaatcgcagtgttgagatattggccaccaagaaacaccagtgcgccggaaaccaaaaggacgccgccaagaatcaccaggaactgctgcttgcgctgctcgcgcagctcttcgcgccagggtagaaggttgatccgtgccatcagtcgaaactcctcaacgccaggccgcaggcgatcatcaacgccggagcgtcgctggccagggcgccggcattcaccttgccgttcagcgccatgtcggcgaacgggttggcgaccagggtcggggtgccgatcttctgctggatcaaccgatcgagatcctggatagacgccgtaccgcccgccaggacgatgtagtcgacgtcgttgaactgtccggcggcgaagaagaactgcagcgagcgggaaacctgctgcaccacggcgtccttgaacggacgcagaacttcgctgtcgtagtcatccggaagaccgccctgcttcttggcgagaccggcttcctccaccgagagtccgtaacgccgctggatctcctcggtgagctggcgaccgccgaacagctgttcgcgggtatagatggtgcgtccgttgtgcaggacgctcagggtggtcatggtcgcgccgatgtccactaccgccacggtcaactggtcggtgtcggcacccagctggctgctcagcagcgcataggagcgctccagcgcgtaggcctcgacgtcgaccaccttggcggtcaggccggccagcgccagggccgcttcgcgaacctcgacgttctctttccgacaggcggccaggagtacgtccacgcgctcgggattgcgcgcggagagtccctggacctcgaagtcgatggcgacttcctccagcggataggggatgtactggtcggcctcgatcttcagctggttttccagttcatcctcggaaagcccggcctccatctcgatggtcttggtgatcaccgccgaaccggcgacggcgaccacggccgacttcaggttggttttcgccttgaccagcacccgtgacaacgcctggccgaccccttccagctcgacgatgttcttttccacgactgcattcggcggaagcggctcgacggcataggcctccactttgtagcggcctccggagcggctcaactcaaggagctttaccgaggtcgagctgatgtcgatccccagcaaggtgttcgctttcttctttatgagccctagcacgaccaattccctattagcgttcaatacttacgaacgattcttcttttttcacattagataccagagccgaaggccaggcaaatggctaggtcacagaaaaattgcttataatgtgaacagcttttgcctttttcctgtcctattcgcttaactctttctttttcctggaaatccgaatctacccatgcgcctgctgaagttcctgtggtggacttgcgtcaccctgatttgtggagtgctgctcagtttcagcggcgcctatctctatctgagtcccagcctgccctcggtggaagctctgcgtaacgtccagctgcagatccccctcaaggtctacagcgaggacggcaagctgatctccgagttcggcgagatgcgccggacgccgatccgcttcgccgacatcccgcaggacttcatccatgccctgctgtccgccgaggacgacaatttcgccaaccattatggcgtcgatgtgaaaagcctaatgcgcgccgccgcgcaattattgaaaagcggtcacatccagactggcggcagcaccatcaccatgcaggtagcgaagaactacttccttaccaatgaaagaagcttctcgcgaaagatcaatgaaatcctcctggccctgcagatcgagcgacagctgaccaaggacgagatcctcgagctctacgtcaacaagatctacctgggcaaccgtgcctatggcatcgaggctgccgcacaggtctattacggcaagccgatcaaagacttgagcctggccgagatggcgatgatcgccggcctgccgaaagcgccctcgcgctacaacccgctggtcaacccgacccgcagtacggagcggcgcaactggatcctcgagcgcatgctcaagctcggcttcatcgaccagcaacgctaccaggccgccgtcgaggagccgatcaacgcctcctaccgcgtgcagacccccgaactgaatgcgccctacatcgccgagatggcccgtgccgagatggtcggccgctacggcagcgaggcctataccgagggctacaaggtcatcaccacggtccgcagcgacctgcagaacgccgccagccaatcggtccgcgacggcctcatcgactatgaccagcgccacggctaccgcggcccggagacccgcctgccgggccagacccgcgacgcctggctcaagcacctgggccagcagcgcagcatcggcggcctggagccggcgatcgtcacccaggtggaaaagagcgggatcatggtgatgacccgcgacggcaaggaaggagccgtgacctgggacagcatgaaatgggcacgccccttcctcagcaacaacagcatgggcccgatgccgcgccagcccgccgacgtggcccaggccggcgaccagatccgcgtgcagcgccaggaagacggcaccctgcgcttcgtacagattcccgccgcacagagcgcgctgatctccctcgacccgaaggacggggcgatccgctcgctggtcggcggcttctccttcgagcagagcaactacaaccgcgcgatccaggccaagcgccagccgggctccagtttcaagccgttcatctacagcgcagccctggacaacggcttcaccgccgccagcctggtcaacgatgcgccgatcgtgttcgtcgacgagtacctggacaaggtctggcgaccgaagaacgacaccaataccttcctcggcccgatcccgctgcgcgaagccctgtacaagtcccgcaacatggtctcgatccgcgtcctgcagggcctgggcatcgagcgggcgatcagctacatcaccaagttcggcttccagcgcgacgaactgccgcgcaacttctccctggccctgggtaccgcgacagtcacaccgatggaaatcgccggcgcctggagcgtattcgccaacggcggctacaaggtcaatccgtacgtcatcgaacgcatcgagagccgcgacggacaggtgctgtaccaggccaatccgccccgcgtgccggtggaagaacaggtcgctgcgccggatgcggaagacgccgggaatcctggtgaccccgagcatccggagatcgccgaaggcgaaggttcgatcgaagcccagcaagtcgccgccaaggcccagaccaccttcgagccgaccccggccgagcggatcatcgatgcccgtaccgcctatatcatgaccagcatgctgcaggacgtgatcaagcgcggtaccgggcgtcgcgccctggcgctgaagcgcaccgacctggccggcaagaccggcaccaccaacgattccaaggatggctggttctccggctacaactccgactacgtgaccagcgtctgggtcggcttcgaccagccggagaccctgggtcgccgcgagtacggcggtaccgtcgcgctgccgatctggatcaggtacatgggcttcgccctcaaggacaagccgatgcacaccatggccgagccgccaggcatcgtcagcctgcgcatcgacccggtgaccggccgttcggccgcgccgggcactcccggcgcctatttcgagatgttcaagaacgaggataccccgccctcggtcaatgaactgccgccaggcagcttccctggcagcccgctgccggatgacgaaggcgcgccgatcgacctgttctgaaccggccggcgcctgcgcttcgttggcgacgacgggagcgcgaggcgcaggcaaaaagaaaccccgccaaggcggggtttctttttatccggcggatcgatcgatcagccgttgaagacgtcgtccaccgatttcagcggatagttcttcggatacggcagggtagccacgccggtctcgatggcagccttggccacggcatcggagaccacggtgatcaggcgcttgtccatcggcttcggaatgatgtactcgcggccgaattccagcttgtccacaccataggcggcgcagacgtcctccggaaccggctgcttggccaggtcgcgcagggccagggcggcggcgatcttcatctcttcgttgatgcgcgtggcacgtacgtccagggcaccacggaagatgaaggggaaaccgagcacgttgttgacctggttcggatagtcggaacgaccggtagccatgatcacgtcgttacgggtggcatgggccagttccggcttgatctccgggtccgggttcgagcaggcgaacacgatcgggttcggcgccatgcgcttgaggtcttccggctccagcaggttggcgccggacaggccgacgaacacgtcggcgccctccagggcgtcggccagggtgcgcttgtcggtctcggtggcgaacaccgacttgtactggttcagatcgtcgcgaccggcgtggatcacgcccttgcggtcgatcatgtagatgttctcgaccttggcgcccatgctcaccagcagcttcatgcaggagatggcggcagcgccggcgccgaggcagacgatcttcgcttcttccagcttcttgccggccagttccagcgcgttgagcatgcccgccgcggtaacgatggcggtgccgtgctggtcatcgtggaacaccgggatgtcgcactgttcgatcagcgcgcgctcgatctcgaaacactcgggagccttgatgtcctcgaggttgataccgccgaaggtgatggaaatacgcttgacggtatcgatgaaagcctgcgggctctcggcgtcgacctcgatgtcgaacacgtcgatgccggcgaagcgcttgaacagcacacccttgccctccatcaccggcttggaggccagcgggccgaggttacccaggccgagaatcgcggtgccgtcggaaatcactgccaccaggttgcccttgccggtgtactggtaggccagttcggcatcgcgggcgatttcacgcaccggctcggcgacacccgggctgtaggccagggacaggtcccgggcggtagcggtgggtttggtcagctcgacactcagttttcccggacggggttgtgcgtgatattcgagggcagcggttttaagatcggacatttgggcacttccgctttattgcttgttggacagacggggcgaccgagcatacgcaagaagacgacgccccacaagatcgtcaggacccggctgtcaagacctctagcgtacgactttaagccaatcgcccggacggggttcaccgctcggataaaggtcattcagcagacgcagacgagccacggagtcactcaatgacccctcgccgccagccgccaattgctccagcgtctgccccgccttgacctgcaccaggtgcaggcgtcgcggctgcgccagggtccgctccttgtcgcgcagcggacggaagctgcggatcacgctgaggaagcggtcgtcctgggtctccagggaaccgaccttgaccacgccgacgaacaggtaggcgcggtcgccctggtagatcacagcaacccgtcgcgccgggttgcctggcaccaccgccgtgtagccgttcagtcctgcctgcttcagcgactcttcctgggccagccgttgcccggcgttcttgcgcaggaactccgcgggcgtcaggcgggaatcatggggcaccagcttcatgccgatgaacgactgctcgtccgccggatagccaagcagggcactgggctggttgaggatcttccagcccgccggatagctcagggtgaagtccagctcggcatggtagaagttctgcccgcgacgcaccccggccgatgccgagtcgccgaacggcatgccttccagatggcgaagaaagacctcgcgccccacttcctgctgtccgttggccagttgccgggccgggccgaccacttcctgcagacgccggtcgttgtccggatgggtatcgaacaacccgtggtagccgccggcctgtaccgcctggccattgcgcgcagcctcttcgcgagcgaagtcctcctggttcttcagcacccgcaccacctggatcatcgccgtcggatcgtagccggcgcgggccaggtactgagcgccgagaccatcggcttccagttccatgtcacgcccgtagccgcggacgaaggccgtgccgagcacgttggccaggtcgccggcggcaccgaccccggtgccgatcgccaccgcctggccaaggatgttccaggcgctggcctggctctgctggcgcacgctgtggcgcgccgtgacgtggccgacctcatgaccgagcaccgcggccagttcggcctcggagccaaggtaggcgatcagtccgcgatggatatagatgtagccgcccggcagggcgaaggcgttgatgtccggcgaatcgatgacggtgaaatgatattgcagattgctgcggtggctgctgcgggcgacccgctcgcctacccgttgcacgtaggcctggagcttttcatcgttgtagcgggggaactgcttgaggatttcctggttgtagcgagcgcccatgccgagttcctgctgctcgctcatcatcacgaaatcgctcttgccggtggccgggttcaccgcgcagccgcccagcgcgccgactcccagcaacagcagcaggagccaggcggtcttcatggcaaccattccagcatcgccggatcggtcaccgacatctgccagcgcgccttgccggccggcacagcgccacggcgggaacgatcgaccacccagccacgcacttccagcgaacgtcccgccatctgcatcacccgtttcgcatcgaacgccttgagcaccttcggctcgatccgcaggaccagcggaccgtccatctccagccagataccgccccggttgcgttcgacctcgagcacccgcccgcggaccacggcgaagccgctctgcgccagtcgatcgagcgaaagcaccggcgaacgcttccatacacccagattagccgaacgcgcggcacgttccgccgcttgctgacaggccgtcagctcggtgttcggcgcgaccgccaccaggtagcccaggccctcgccgagcaggcgcgcctcgaggttggcgccgctggcatcgaacaggtgcgccagggtccgcccgtagtgatcgcggggctggcggcccggctgcagggcgagacgcccgtcgctggccgataccagcgcctgcagccgctgcttcgcggcttcggcgaagggctcggtggtgcggccgttgtgcgccagttcaggtgcattgataccgatcagccgcacgctgcggccatcgcgcaggcgcacggtatcgccgtccaccacccgcgccacctcgacgtcctgcaaggcaccggtaggccggcaggcctccgccgcaccggcgaaggcggaaaccacggacatgaaaaaggcgcccaccagggacgcctttctcggtacagcgacaagtagcattgcgcgcgttcgcggcaagcggcttacttggtggcgccgaatacgccgaaacgctgcttgaagcggtcgatacggccgccggtgtccagcaccttctgcttgccggtgtagaacgggtggcattcggagcacacgtccaggtggatcggcttgcacagggtggaacgggtcttgatgacgttaccgcagctgcaggtagcttcgatagcttcgtaagtcggatggatgtccgctttcatgattcaatcctcgaggcgttgtgtgccgccacccagcgcgtttaccaggcaccgcacgtaattaagggcgtggatcataccagaccgattcatctatgcaagcgaccccgcccgccggtcgtctgctaacatcgccggcccagtcctcgtttccttcatccccggaagccgctgagtgtcagacctgatcctacgcctagccctgccttcgccactccgccgcctgttcgactaccgcgcgccccgcggcattccgcgcagcgccctacagccggggattcgcctgctgctgccgttcgggcgccgggagctggttggcgttctgatagaggtgacggaccgttccgaagtacccgaagacaagctcaagcctgccctcagggtactcgacgccaagccgccgatgccggcgcacctgctcgaactctgtcgctggaccgcccagtactaccagcacagcctcggcgacaccctgtcctgggcgctgcccaacctgttgcgccagggcgagccggccgaggcgcgccagcagcgcttctggcatgccaccgcgcaatccagcctcgacgatccgcgcctggcccgggcgccgcgccagcgccaggccctggcgattctcaagcagcatccgcacggggtgtcccatgagttgctgaaccagttgcagataaacaaggacagcctcgacctgctcaaggaaaaaggcctggtcgaactggaggtgcggcgccactgcaccccgccgcgcgaaggcggctggctggcccaggcggagttgccgctgaaccccgagcagcgcgccgccttcgaggcggttcgcgccagccacggcggtttccattgcttcctgctggccggggtcaccggcagcggcaagaccgaggtctacctgcaactgatccgcgaaaccctggccgcaggccgccaggccctggtgctgattcccgagatcaacctggggccgcagaccctggcgcgtttcgaacgccgcttcaacgcgcgcatcgccctgctgcattcggccctgaccgaccgcgagcgcctcgacgcctggctcgccgcccgggatggcgaggccgacatcgtcatcggcacccgctcggcactgttcacgccgctgaagcggccgggactgatcatcgtcgacgaggaacacgacgcctcctataaacagcaggacggcctgcgctaccacgcccgcgacctggcactggtacgcgcacgcctggagaacgtgccgatcctgctcggttcggccacgcccgccctggaaagcctgcacaacgcccaggccggccgctacggcctgctgcgcctgacccagcgcgccggtggcgcgcacccgccgaaattcatccgcctcgacgtgaagagcatgccgctcgacgccggcctttcccgcccgctgcaacaggccatcggcgataccctggcggccggccagcaggtcctggtgttcctcaaccgccgcggcttcgctccgaccctgctttgccacgactgcggctggatcagccaatgcccgcgctgcgacgcgcggatgaccgtgcaccagggcagcggcgagttgcgctgccaccactgcgaccaccgccagcggccgccgatgaactgcccgcagtgcggcaagctcgacctgcgtccggtaggcgccggcaccgagcgcgccgaggaacgcctgcggattctcttcccgaaccatccggtgctgcgcatcgaccgcgacagcacctcgcgcaagcacgccatgcgcgacctcttcgccaccatcaacagcggtgagccatgcatcctggtcggcacccagatgctcgccaaggggcaccacttcccacgggtcaccctggtggcgatcctcgatgccgatggcggcctgttttccgccgacttccgcgccagcgaacgcatggcccagcagatcgtccaggtcgccggccgcgcaggacgcgccgaggagcccggacgggtactgatccagacccacctggccgatcacccgctgctggtccagctcaccgaggacggctacttcgcctttgccgaacaggccctcagcgaacgccgcgccgccggcctgccgcccttcgcccacctcgccctgctgcgcgccgaagcgcacaagccgggccaggcggaagccttcctcgacagcgcctgcagtgccgccgagcaattgctcgagcagatgggcggaccggaggtggaactgctcgggccggtgcccgcgcccatggagcggcgtgccggcaagcaccgcgcgcaactgctgctgcagtgcatgagccgggcgccgctgcatcgcctgctgacgccctggctgcagagcctcgaacagttgcccggcgggcgccaggtgcgctggtcgctcgatatcgatccgatcgacctgttctgagcgccttccaggaagacgccccgcttgactggggtcagccggaatccgcgatgtccggcgcaaactgtcggctaatcgccgcaacggttggcaacgcctgtccgcccacggataatgcgcggttctgagcctcgaccggccaccccgcgcacatcgcggggagtgaacttcggagcgccgcatccgccggcccttcccctgcccgaccgtcgcgcgccgcccctctgcccgcgagcacggagaaaaacgatgaaagacacgattcgccagctgatccagcaagccctcgaccaactgaccgcggacggcaccctgcccgccggcctgaccccggacatccaggtggagaacaccaaggaccgtagtcacggcgatttcgccagcaacatcgccatgatgctggccaagccggccgggatgaagccgcgcgacctggccgccaggctggtcgaggcaatccccgcccacgagcaactggccaaggtggagatcgccggccccggcttcctcaacttcttccaggatcacgtctggctcgccgccagcctcgaccgcgccctcgccgacgaacgtctcggcgtgcgcaaggcaggcccggcgcagcgcgtggtgatcgacctgtcctcgccgaacctggccaaggaaatgcacgtcggccacctgcgctcgaccatcatcggcgacgccgtcgcgcgcgtcctcgagttcctcggcgacacggtgatccggcagaaccatgtcggcgactggggcacccagttcggcatgctgctcgcctacctggaagagcaaccggtcgacgccgaggccgagctgcacgacctggaggtcttctaccgcgcggcgaagaaacgcttcgacgagtctcccgaattcgccgaccgcgcccgcgaactggtagtcaagctgcaggccggcgaccccgactgcctgcgcctgtggacccgcttcaacgagatttccctgtcgcactgccagaaggtctacgaccgtctcggcgtgaagctgagcatggccgacgtcatgggcgagagcgcctacaacgacgacctcgcccaggtggtcgccgacctgaccgccaagggcctgctcaccgaagacaacggcgcgttgtgcgtcttcctcgaagagttcaagaacgccgagggcaatccgctcccggtgatcgtgcagaaggccggcggcggctacctctacgccaccaccgacctcgccgccatgcgttatcggcacaacgtgctgcacgccgaccgcgtgctgtacttcgtcgaccagcgccaggccctgcacttccagcaggtcttcgaagtggcgcggcgcgccggtttcgttccggccggcatggagctggagcatatgggcttcggcaccatgaacggcgccgacggccgtccgttcaagacccgcgacggcggtacggtgaagctgatcgacctgctggaagaggccgagagccgcgcctatgcgctggtcaaggaacgcaacgagcagcgcgccgagcgtggcgaggagccgttcgacgaggtccagctgcgcgagatcggccgggtggtggggatcgactcggtgaagtacgccgacctgtccaagcaccgcaccagcgactacagcttcaacttcgaactgatgctgagcttcgaaggcaacaccgcaccctacctgctctacgcctgcacccgcgtggccagcgtcttccgcaagctcggccagggccgcgagcaactgggcgggaagatcgtcctcgagcagccccaggagctggccctggccgcacagctggcgcagttcggcgacctgatcaacaacgtcgcgctcaagggcgtgccgcacctgctctgcgcctacctgtacgagttggccgggctgttctccagcttctacgagcattgcccgatcctcaccgccgaggacccggcgcagaaggacagccgcctgcgtctcgccgcgctgaccggccgcaccctggaacagggcctggagctgctcggtctgaagactctggaacgcatgtaatcgaacccgcccgaacaggagtccgggaacccccatggcaaagaagaaacccgcccccaagcgcggcgccagccgctaccaggcgcccgccgcgaagaacggcgttcccggctgggtctggctggtcgccggcctggccatcggcggcttcatcatgttcctgatgaagctcgaacccgggcgcaaggacgtccagcgcgaacgcccggacgcccagcgcccggccgccgtgcagggcaagcagccgcagcagaacggccaggcccagcagcccgcgcaaacgcagacgccggcccaggccaagccgaagtacgagttctacaccctgctgccggagtccgaggtcgtggtgccgccggaagcggtaccggagaaggccccgccgccgcccacccccgccgagctggccaaggccgacgaagcgcgggccaaggccgcactcgccgggcaggtgccaccgccgctgccgaaagcggtggtcgccgccagcacgcagttcttcctgcaggccggctcgttccgcaagcagtccgacgccgaccgcgtgcgcgcgcagatcatcctgctcgggcagtcggtgaacgtcgaggccggcaacgtccgcgacgagacctggtaccgggtgatggtcggcccgttcaacagccgcgaccagttgtcccaggcgcagaagacactgtcctccaacggcttcagcaacctgctgttacagcaacgcaaggcccgctgaacgcgggccacgtcgtgcgttccgacgcacggcggtgcgtgcggttgaaaagccgcggatcgcccctatatctcccagcattccgggcattcggccccgcagtgtggagatttcccccttgaccaccatcgtatctgtccgccgcaacggcaaagtcgtcatgggcggcgacggccaggtttccctgggcaacaccgtgatgaaaggcaacgccaagaaggtccggcgcctgtatcacggtcaggtactggccggtttcgccggcgccaccgccgatgccttcaccctgttcgagcgcttcgagcagcaactggagaaacaccaggggcacctggtccgcgccgccgtcgaactggccaaggactggcgcaccgaccgctccctgagccgcctcgaagccatgctcgcggtcgccaacaaggatgcctcgctgatcatcaccggcaacggcgacgtggtcgaacccgaacacggcctgatcgccatgggctccggcggcggcttcgcccaggccgcggccctggccctgctgcagcacaacgccgagctgagcgctcgggaagtcgccgagaccgcgctgaacatcgccggctcgatctgcgtcttcaccaaccagaacctgaccatcgaggagctggacagcgccgtctgaagcgctcgtcccccgctggagtaaacgaatgtccatgacgccccgcgagatcgtccacgaactcaaccgccacatcatcggccaggacgacgccaagcgcgccgtcgccatcgccctgcgcaaccgctggcgacgcatgcaactgccggccgagctgcgcgccgaggtaacaccgaagaacatcctcatgatcggccccaccggcgtcggcaagaccgagatcgcccgccgcctggcgcgcctggcgaacgcgccgttcatcaaggtcgaggcgaccaagttcaccgaggtcggctatgtcggacgcgacgtcgaatcgatcatccgcgatctcgccgacgccgcggtgaagatgctccgcgaacaggagatccagaaggtcaagtatcgcgccgaggacgccgccgaagagcgcatcctcgatgccctgctgccggccgcgcgtcccgccatgggcttcggcgacgagccggcacgcgaggacagcaacacccgccagctgttccgcaagcgcctgcgcgaaggccagctggacgacaaggaaatcgacatcgaggtggccgacaacccggccggcgtggagatcatggccccgcccggcatggaggagatgaccaaccagttgcagaacctgttctccggcatgagcaagggcaagaagaagacccgcaagctgaaggtcgccgaggccctgaagctgatccgcgacgaagaggcggtgcgcctggtcaacgaggaagagctcaaggcacgcgccctggaggcggtcgagcagcacggcatcgtcttcatcgacgaaatcgacaagatcgccaagcgcgccaacgccggcggcgccgacgtctcccgcgagggcgtacagcgcgacctgctgccgctgatcgagggctgcacggtgaacaccaagctgggcatggtcaagaccgaccacatcctgttcatcgcctccggcgccttccacctgagcaagccgagcgacctggttcccgagctgcagggccgcctgccgatccgcgtggagctcaaggccctcagtccgaacgatttcgagcgcatcctcaccgagccgcatgcctcgctcaccgagcagtaccgcgagctgctgaagaccgaggggctggccatcgagttcgccgaggacggcatcaagcgccttgccgagatcgcctggcaggtcaacgagaagaccgagaacatcggtgcccgccgcctgcatacgctgctcgagcggctgctggaagaggtctcgttcagcgccgccgacctggccagcgagcatagcgacaagccgatcctgatcgatgccggctacgtcaacagccacctcggcgagctggccgaggacgaggacctgtcccgctacatcctttgaccaccgccgccgccacggccaacaccgtggcggcgggccgcgcggtcccgaaccggggtatccttgtactccgcccttccgcgagtccgatgcgatgcgtatcccttccgccatccagctacacaaagcctcgaagaccctgaccctgcgctacggcgaggatagctacgacctgcctgccgagttcctccgcgtgcattcgccctcggccgaggtccagggccacggcaacccggtattgcagtacggcaagctgaacgtcggcctggtcggcgtcgaacccgccggccagtacgcactgaagctgagcttcgacgacggccacgacagcggcctgttcacctgggactacctgtacgagctggcgacccgcaaggaccagctatgggccgactacctggcggagctggccagcgccggcaagtcgcgcgaccccgacgagtcggtcgtcaagctgatgctctgaagcgccgggccgagtgccccttcgcggcacacggcatccaggcgatttttctccgctgccccgaacgagggcacgtcatttgcaacattcgccccgcagactgccagaccagacatccggtcggcgcggtcgccacggcgaatgtcctaccctgcacggcagcaacgctctagtccgcaggtcggccgctcgccgggccagccacgccggccaccgatgcttctgccagcttgcacgccagcggaaactcgcgtaaccaagacggtgcagccccttgtccgggttcccttccctgacgtgcgtccgccccgccctgaaacgtgcgggtgggctggtagtcgagcagtagccggccggacacctggtccccggtttcgttgcggtcccctgtttcgcctcgaacaatggagcgttgccgatgagtcagaagaacaataacgagcttcccaagcaagccgcggaaaacacgctgaacctgaatccggtgatcggcatccggggcaaggacctgctcacctccgcgcgcatggtcctgctccaggcggtgcgccagccgctgcacagcgccaggcacgtggcgcatttcagcctggagctgaagaacgtcctgctcggccagtcggagctacgcccaggcgatgacgaccgacgcttttccgatccggcctggagccagaatccgctgtacaagcgctacatgcagacctacctggcctggcgcaaggagctgcacagctggatcagccacagcgacctgtcgccgcaggacatcagtcgtggccagttcgtcatcaacctgctgaccgaggcgatgtcgccgaccaacagcctgagcaacccggcggcggtcaagcgcttcttcgagaccggcggcaagagcctgctggacggcctcggccacctggccaaggacctggtgaacaacggcgggatgccgagccaggtggacatggacgccttcgaggtgggcaagaacctggccaccaccgagggcgccgtggtgttccgcaacgacgtgctggaactgatccagtaccggccgatcaccgagtcggtgcacgaacgcccgctgctggtggtgccgccgcagatcaacaagttctacgtcttcgacctgtcgccggacaagagcctggcgcgcttctgcctgcgcaacggcgtgcagaccttcatcgtcagttggcgcaacccgaccaagtcgcagcgcgaatggggcctgaccacctatatcgaggcgctcaaggaggccatcgaggtagtcctgtcgatcaccggcagcaaggacctcaacctcctcggcgcctgctccggcgggatcaccaccgcgaccctggtcggccactacgtggccagcggcgagaagaaggtcaacgccttcacccaactggtcagcgtgctcgacttcgaactgaatacccaggtcgcgctgttcgccgacgagaagaccctggaggccgccaagcgtcgctcctaccagtccggcgtgctggagggcaaggacatggccaaggtgttcgcctggatgcgccccaacgacctgatctggaactactgggtcaacaactacctgctcggcaaccagccgccggcgttcgacatcctctactggaacaacgacaccacgcgcctgcccgccgcgctgcacggcgagttcgtcgaactgttcaagagcaacccgctgaaccgccccggcgccctggaggtctccggcacgcccatcgacctgaagcaggtgacttgcgacttctactgtgtcgccggtctgaacgaccacatcaccccctgggagtcgtgctacaagtcggccaggctgctgggtggcaagtgcgagttcatcctctccaacagcggtcacatccagagcatcctcaacccaccgggcaaccccaaggcacgcttcatgaccaatccggaactgcccgccgagcccaaggcctggctggaacaggccggcaagcacgccgactcgtggtggttgcactggcagcaatggctggccgaacgctccggcaagacccgcaaggcgcccgccagcctgggcaacaagacctatccggccggcgaagccgcgcccggaacctacgtgcatgaacgatgaaaagcgaccagcctgaagaacagccgcaggagcgatccgcggcctccgccgacgaaaccccgccagcgcctccggcgcggccccgtgccgcgcggaagccggccaggccccgtatcgccgagcccgcggccgcgccgccgaggaccccgagcatgccccagcccttcgtcttccggaccatcgacctcgacggccagaccatccgcaccgcagtgcggccgggcaaggaaggaagcactccgctgctgatcttcaacggcataggcgccaacctggaactggtgttccccttcgtccaggcgctcgacccggaactggaggtgatcgccttcgacgttcccggcgtcggcggttcctcgacgcccagcgtgccctaccgctttcccggcctggccaagctggcggcgcggatgctcgactacctggactacggccaggtcaacgcgatcggcgtgtcctggggcggcgcgctggcccagcagttcgcccacgactatccggaacgctgcaagaagctgatcctcgccgccacttcggctggcgcggtgatggtgccaggcaagccgaaggtactgatgcgcatggccagcccgcggcgctacatccagccctcctatggcgtacacatcgccccggacatctacggcggggccttccgccgcgaccccaagctggccatggcgcatgccagcaaggtgcgttcgtcgggcaagctgggctactactggcaactgttcgccgggctcggctggaccagcatccactggctgcataggatccgccagccgaccctggtgctggccggcgacgacgacccgatcatcccgctgatcaacatgcgtgtgctggcctggcgcattcccaacgccgaactgcacgtgatcgacgacggccacctgttcctggtgacccgcgccgaatcggtggcgccgatcatcatgaagttcctcgccgaggagcgccgtcgcgccgtcatgcaccctcgtccgttcctgcccaagaccggctgaactgctgcacgggcaacaccagggcagcagacactgcttcgtcatggtgcaggtgcatagtcaatgttccgcaacggcgcatggcgcctggcttcgccgcgacagcgcaagctctgcgacgcccctcccggcgttgtggtacagcgcttgctgccccactgtcgggcggcatcctccctgttcaggcaggtgtgcggttctgccccgggtgaaacggaattcacaggctataactgagtattccgagcccgggggacgatcgcccgtggcatccagactgtggtcctacgacggagtgtggtccatgcgagaaaagcaggaatcgggtagcgtgccggtgcccgccgagttcatgagtgcacagagcgccatcgtcggcctgcgcggcaaggacctgctgacgacggtccgcagcctggctgtccacggcctgcgccagccgctgcacagtgcgcggcacctggtcgccttcggaggccagttgggcaaggtgctgctgggcgacaccctgcaccagccgaacccacaggacgcccgcttccaggatccatcctggcgcctcaatcccttctaccggcgcaccctgcaggcctacctggcgtggcagaagcaactgctcgcctggatcgacgaaagcaacctggactgcgacgatcgcgcccgcgcccgcttcctcgtcgccttgctctccgacgccgtggcacccagcaacagcctgatcaatccactggcggtaaaggaactgttcaataccggcgggatcagcctgctcaatggcgtccgccacctgctcgaagacctggtgcacaacggcggcatgcccagccaggtgaacaagaccgccttcgagatcggtcgcaacctcgccaccacgcaaggcgcggtggtgttccgcaacgaggtgctggagctgatccagtacaagccgctgggcgagcgccagtacgccaagcccctgctgatcgtgccgccgcagatcaacaagtactacatcttcgacctgtcgccggaaaagagcttcgtccagtacgccctgaagaacaacctgcaggtcttcgtcatcagttggcgcaaccccgacgcccagcaccgcgaatggggcctgagcacctatgtcgaggccctcgaccaggccatcgaggtcagccgcgagatcaccggcagccgcagcgtgaacctggccggcgcctgcgccggcgggctcaccgtggccgccttgctcggccaccttcaggtacgccggcaactgcgcaaggtcagtagcgtcacctacctggtcagcctgctcgacagccagatggaaagcccggcgatgctcttcgccgacgagcagaccctggagagcagcaagcgccgctcctaccagcatggcgtgctggacgggcgcgacatggccaaggtgttcgcctggatgcgccccaacgacctgatctggaactactgggtcaacaactacctgctcggcaggcagccgccggcgttcgacatcctctactggaacaacgacaacacgcggctgcccgcggcgttccacggcgaactgctcgacctgttcaagcacaacccgctgacccgcccgggcgcgctggaggtcagcgggaccgcggtggacctgggcaaggtggcaatcgacagcttccacgtcgccggcatcaccgaccacatcacgccctgggacgcggtctatcgctcggccctcctgctgggcggccagcgccgcttcatcctgtccaacagcgggcacatccagagcatcctcaaccctcccggaaaccccaaggcctgctacttcgagaacgacaagctgagcagcgatccacgcgcctggtactacgacgccaagcgcgaagagggcagctggtggccggtctggctgggctggctgcaggagcgctcgggcgagctgggcaaccctgacttcaaccttggcagcgccgcgcatccgcccctcgaagcggccccgggcacctacgtgcatatacgctgaaagatccggcccgggcgcctggagccgggcacctccatccccagaagaagtccggatgaagacacgcgaccgaatcctcgaatgctcgctgttgctgttcaacgaacagggcgagcccaacgtctcgacactggagatcgccaacgaactgggcatcagcccgggcaatctctactaccacttccatggcaaggaaccgctggtgatggcgctgttcgagcggttccaggccgagttggcgccgctgctcgatccgcccgaggaggtgcgcctgggcgcggaggactactggctgttcctgcacctgatcgtcgagcgcctcgcccactaccgcttcctgttccaggacctgtccaacctgaccgggcgcctgccacggctggctcgcggcatccgtacctggctcggcgcgctgaagcggaccctggccaccctgctggcccgcctcaaggccgaccggcagttgcgcagcgacgcgccggcactcgggcaactggtcgaacagatcaccctgaccctgctgttctccctggattaccagcgggtactgggcagcaagggcgaggtgcgcacggtggtctaccagatcatgatgctggtcgccccgcatctgcgcagcgaggcccaacgctcggcggaaagcctggcgcagcgctacctgggaccggaatgaaaaacgcccggcgagtgccgggcgtgtgccttgccgccaggactcagccctggctgctcggcgtcgccggagcgttcgctgccggagcgctggcagccggtgtggcggcgggggcagcgggcgcgctcgaagacgcggcgggagcggccggtttcgccgcggcgggcttggctgccggcttcttcgccgcaggctttttcgcagccggcttggcggcaggtttcgccgcgggcttggcggcggtcgcagcggccggcttggctgccggcttcgcggcaggcttggctgcggcaggtttcgcagcaggcttcgccgcggccttggctgccggcttggtcgccggtttcgctgcggccttcgcagtcggtttggcggcgggcttggctgccggcttggcggccgcggttttcgccgcggtttttttcgccgcgggtttcgccgcaggcttggcggcggccttggctgccggtttagctgccggcttggccgctgcggttttcgccgcgggcttggcagccggtttcgccgcaggcttggccgctgccttcgccgccggcttgacgctgacgccggtgagtttctcgatctgcttggtcagcgtatcgaccttgctgtgcagctccttcacctcgttgcggctcggcacgccgagacgcgagatggcgctgttcaggcgcttgtcgaaagcttcctcgagctcgctccacttgccgagcgcacggtcccgaacctcgtcgaccttgctcttcgcagagcgggcggaagccttcgccgcaccgacctgcgcgtccacatcggacttcgcttctttttcagccttctcgccgtctttcaccaaggtctcgaacagcttgctgccgtccttgctgaccttcgagtaggcccccagaccagccagccagatctgccgcgagtatttctcgatctcgccgatccaactggactctttttcgctcttcttcttgccagccatcctgctctccttattgggttctcgcgacacgctcgagcactgcgctcagctcatccagcttagcagagagtgcttcgacatcgttccgggaaggtatgcctatccggttcaacgtgctagcgacacggctgtcgaatgcctgctcgatcctgtcgagctggtcttcaacttttcccttcaccgaagagaggccggtcttgacactgtcattggccgaatcgacctgacttgtgaccagcgatttgccttttttctccagggcttcgccagctttcaccaattccttgaagtagtcgctgccttcggtgcccaggcgggaatacgcacccaggccggcaagccagatctggcgggcatagtggcggatctcggagaccagggaagtggattcggaaacggtctttttcttcagggcaatcttggccatggggcacctcacgctcgttgggttgaagaaaccgcaggcgccgccggaacgctggcagcgtgagagcaaggtatcggggaaaattagaaaccgcatactaagcggaagatgggcgccgccaggacggcgaacgcccggcggatcaggccagcgccttgtccagcgccttctcgatctcgcccttgagcaggccgctcatggccgacagcatcaggccgagcttgacgtccaccgcgaccttgtccgcccccaccgcgatcctgccgtcgacgccactgcgtttgaaggtcagctcgtcgccctgccattcgcactgcacgccgtgctccttcgccagacgttcggccagtttctccgccttggcccgtgcggcgtccagccccaggctgtgcggacgttcgatgtggatacgcgacatggatcgactcctgattgcagatcggaaaactatacgcggccagacaaaacaccgcacccgcgccgtcggacggcggcacagcactttccccacatcctgttagaatgcccggcattctttccaggtgagaacgtcatgaacgatccccgcaaaggcgccgacgccgaacccaccacccacttcggctaccagaacgttccggaaagccagaaggcgaagaaggtcgccgaggtatttcactcggtggcagccaagtacgacctgatgaacgacctgatgtccggtggcatccatcgcctgtggaagcgcttcaccatcgagctgtccggcgtgcgcagcgggaaccgcgtgctcgacatcgccggcggcaccggcgacctgacccggcagttctcgcgcctggtcggcccgaccggcgaggtggtgctggccgacatcaacgcctcgatgctcaaggtcggccgcgacaagctgctcgacaagggcgtctccggcaacgtcagcttcgtccaagcggacgccgagaagctgcccttcccggacaaccacttcgactgcgtgaccatcgccttcggcctgcgcaacgtcacccacaaggacgaagcgatccgctccatgctgcgcgtgctcaagcccggtggccgcctgctggtgctggagttctccaagccgagcagcaacctgctgtccaaggcctacgacgcctattcgttcagcctgctgccgctgatgggcaagctggtcaccaacgactccgagagctatcgctacctggccgagtcgatccgcatgcaccccgaccaggaaaccctgaaggcgatgatggtggaagccggcttcgaccgcgtgacctaccacaacatgaccggcggcatcgtcgccctgcaccgcggtatcaagccttaaccgagggcgcgccgatgagctcgctgctgatccaggccgtgctggccgccgccgaaaccggcatcaatcgcgtcctgcgcctcgacgggacagcgctgccgcgcctgcgcaggctttccgccaaggtcatcgaggtcgactgcctgagcccgccgctgcggatcttcatcctgcccgccggcgacggcctgcacttcgccgcgcagcatgaggcggaggtcgactgcaccctgcgtgcgccggccggcaacctcctgcacctggccctggcgcgcgacaagacccgcgtcctgcacagcccggaagtcagcatggacggcgacagcgcggccctgctggaactggccggcatcctgcagagcctggagctggactgggagtacgaactgtcgcgctggctcggcccgctcgccacccaggtgctcggcagcggcctgcgcgacgcttcgcgctggagcgcgcagagcctgcacagcctgcgcctgaacctggccgactaccttgccgaggaaagccgtacgctggtcggccagcacgaagccgaagcacgcttcgccgaactggaccagctgaagctggccctcgatcgtctcgacgcgcgcgtcggacgcctcagccaaaagaccaagcccgacgcatgaagctcctcgctgtccgccgcctcctgcgcatccagcgcgtcgtcatccgctaccgcctggacgacctgatcctcgaactgccgatgctgccctggtggctgcgcctgctcggtgccaccctgccctggcgctggctgccgcggcgcaagctggaactgacccgcggcgcgcgcctgcgcctggcactgcaggacctcggaccgatcttcatcaagttcggccagattctctccacccgccgcgacctgctgcccgacgacatcgccaacgaactggcctggctgcaggacaaggtgccgcccttcccgccggagctggcggtcaagcgcatagaggaacagctgggcgcgaagatcgaacaggtcttcgcccgcttcgaacgcgaaccgctggcctccgcctcggtggcccaggtccacgccgcgcgcctgaagagcggcgaggaagtggtggtgaaggtgatccggccgaacctggaaccggtgatccgctccgacatcgcctggctgttcatcctcgcccgcctcgccgagcgggtctccagcgaggcgcggcgcctgcacccggtggaagtggtcagcgactacgagaagaccatcgtcgacgaactcgacctgctccgcgaggcggccaacgcctcgcagctgcgacgcaacttcgaaggctcgccgctgctctacgtgccacaggtctactgggactggtgccggcccaaggtgctggtgatggagcgcatctacggcatcccggtgaccgacctggaaaccctgcgcgaccagcgcaccgacttcaaggcactggccgagcgcggcgtggagatcttcttcacccaggtgttccgcgacagctttttccatgccgacatgcaccccggcaacatcttcgtcagcacccgcgcgccctggagcccgcaatacatcgcggtggactgcggcatcgtcggcagcctgaccgacgaggaccaggactacctggcgcgcaacctgatcgccttcttcaagcgcgactaccgcaaggtcgcccaactgcatatcgactccggctgggtaccggcggaaaccaaggtcaacgacttcgaggcggcgatccgcaccgtctgcgaaccgatcttcgagaagccgctgaaggacatctccttcggccaggtcctgctgcgcctgttccagaccgcgcgtcgtttcaacatggagatccagccgcaactggtgctgctgcagaagaccctgctgaacatcgaaggcctcggccgccagctctacccggaactcgacctgtgggccaccgcccagccgttcctggagcgctggatgcgcgaacgggtcagcccgaagcagttgctgcgcaatttccagcaacaggtcgagcaggtgccgcacctgtcgcaaatggcccgcgacaccctcgaacgcctgtcacaaccgcacgcccacaatgcgccgccgccggagtggaaaggttcccgccacgactggctcgggcgcctggtgggcgcggtgctgctggtcggcgccgccgaggtcggcctgggtcagcagttggaagcctggccggcgtgggtgatgctggccggcggggtgttcctgatcctgcgccgctagcgccgcgcacggccactaggcccgcgccgatagccagtcgcgctcccggctggcacactactcccatttccgccggaaacgcgcgcaacgtaccggcaacgaacgtggaaagaccatgaaagactggctggatgagattcactggaacgccgacggcctggtcccggcgatcgcccaggatcacgagaccgggcgcgtgctgatgatggcctggatgaaccgcgaggcgctggccctgaccgccagcgagaaccgtgcaatctattggtcgcgttcgcgtggcaagctgtggcgcaagggcgaggagtccgggcacgtgcagaagctgcacgaactgcgtctggactgcgacgccgacgtggtcatcctgatggtcgagcaggtcggcgggatcgcctgccataccggccgggaaagctgtttctaccgcgtcttcgagaacggcgcctggaagaccgtcgatccggtgctgaaggacccggacgctatctacgaacacgcaggacaccaccatgagtgacaccctgacccgcctggcggcggtgctcgaggagcgcaagaacgccgcgcccgacagctcctatgtggccagtctgtaccacaagggcctgaacaagatcctggagaaggtcggcgaggagtcggtggaaaccatcatcgccgccaaggatgccgcggccagcggcgactgccaggacctgatctacgaaaccgccgacctctggttccactcgctggtgatgctctcggccctcggccagcatccgcaagccgtgctggacgaactggagcgccgcttcggcctttccggccacgccgagaaagccgcccgccaaccatcggcctgaacctacacattgcgaggaatacgacatgggcatttttgactggaaacactggatcgtcatcctgatcgtcgtggtactggtgttcggcaccaagcgcctgaagaacctcggttccgacgtcggcgaagcgatcaagggcttccgcaaggcggtgaacaccgaggaagacgacaagaaggaccagcccgccgcccagccggcccaaccgctgaaccagccgcacaccatcgacgcccaggcgcagaaggtcgaagagccggcgcgcaaggactgacgggtagccatcgatgttcggaatcagcttcagcgaactgttgctggtcgggctggtcgccctgctggtgctcggccccgagcgcctgccgggcgccgcacgtaccgccggcctgtggatcggccgcctgaagcgcagtttcaataccatcaagcaggaagtggaacgggaaatcggtgcggacgagatccgccggcaactgcacaacgagcacatcctctcgatggagcgcgaagcgcagaagctgctggccccgctgaccggccagaatcccccgcaggaaaccccgccgccggcggccgaaagcccggcgccaagcgtaccgacgccgccgccgaccagcacgcctgcggttccgcccgcggacgccacggcaccgccggcagtcgctgcctccactcccccttcgccaccgtccgagacgccgcgtaatccatgagcgccgataaacccgagcagcccgagcacgaccaggaaatgcccctggtctcgcacctgaccgaactgcgtacgcgcctgctgcgcagcgtggcggcgatcttcctgatcttcgccggcctgttctacttctcgcagaagatctacaccctggtctccgagccgttgcgccgcttccttccggaaggcaccagcatgatcgccaccgacgtcgcctcgccgttcctcgcgccgttcaagctgaccatggtggtggctctgttcctcgccatgccggtgatcctcgcgcaggtctggggcttcatcgcgcccggcctgtacaagcacgagaagcgcgtggcgctgccgctgctggtgtccagcatcatcctgttctacgccgggatggccttcgcctacttcctggtgttcccgatgatcttccacttcttcgccagcgtgacgcccgagggcgtggcgatgatgacggacatcaacagctacctggacttcgtcctgaccctgttcttcgccttcggcgtcgccttcgagatcccggtggccacggtgctgctgatctggatcggggtggtcgacgtcgagtacctgaagaagatccgcccgtacgtgatcatcggctgcttcgtggtcggcatggtcctgaccccgccggacatcttctcccagaccatgctcgcggtgccgatgtggctgctgttcgagatcggcctgctgttcggccgcctggtacgcaagcgcggcgagcatccggacgaccaaccggccagcgacggcgaccagcctccggccacccgccagtgaacctgctgctcctcgacgacgccgacttcgtgtcggcggatcgtgcggtcctgcacgatcgccgcctcaagcacctgcacgaagtgcaccgcgccgagaacggcgacaccctgcgggtcggccgcctcggcggctggatgggcgaaggccgcctgctgaagctcgacgccagcgaggcgaccctggaggtgcgcttcgaccagccgccgccggccaagctgccgatcaccctgctgctggccttgccgcgaccgaagatgctccgccgggtgttgcagaccatcgccgcgatgggcgtaccgaagctggtgctgctgaacagctaccgcgtggaaaagagcttctggcagaccccgttcctcgacccggcggcgatccgcgagaacctggtcctcggcctggagcaggcccgcgatacggtgctgccggaaatcatcgtcgagaagcgcttcaaacccttcgtcgaagaccgcctgccggccctggccgccggcagcctcggcctggtcggccatcccggcccctggccggcctgtccgcgcgcggtggagaagccggtgaccctggcgatcggcccggaaggcggctggattccctacgaggtcgacaagctgcgcgaagccggactgcatccggtgcagctcggcgaacgcatcctgcgcgtggaaaccgcggtcagcgccctgcttgcgcggttgttctgaaaaaactccggtaaaagactgaaggttttccccgcccggccgacatcctctgtcgcgcagggctccgcacgacaaccataagacctcgcccgccggccacgtaccggccctccgcgcccgcacgccggacgcgacgacgctgagccattacctgttccgccacgccatggggctgccaacccagggtgtcgcactgcctggagtaatgacgatgtacgattggtgggttctccaactggccaagctgagcgtcagccgcaagctgatggtcggtttcggtgtcctcctcgcgctgcttctgctggtggtgatcagcagcaaccgcaccctcacgcaccagaccgccctcagcgagcagctcgccgaagtcgccagcctgatggaacaggcccagcaagccgaacaaggccgcctggcattcgaagccggcagcgacccgcgccaggccgagcaggtccgccagaccctggccgggatgctccagcgcctgcaggcgctgcgcgacagcgagcttgacccggccgccctggcccaccaggccgaagccatcgaagcctaccgcaaggccttcgacgacctcgccgcagccgatcagcaacgcagcgccgcccgtggtgtgctggtgggcactgcacagcaggcgctggacagcttcgcccgcctcgaggaactgatggacgccagcctcgcgcagcaggccggcgacccgcaggcgttgcaacgtagccgtgcggtggccgacctgcaccaacagttgctcatggtgcgttaccaggtgcgcggctacgtcttcgaacgcagcgacaaggccgagcaggccgcgttcgccgcgttcgacgccctccgccaggccgccacgacgctgcgtggccagttgcccggcgaggccgatgcggcgctggaacaggccatgggtagcctccagggctatcgtggcgggatcgagcagttccgtgccggcgtcatccgcacgcgccaggcgcagcaagcgatgcaaagcagcacccaggatatggcccgggccggccggaccctcaccgaagccggtcgccaattgcgcgagagcaccgccagccgcgaccgcgccagcctctggctgatcgccgcgctggccctggccttcggctgcgtcgccggctgggcgatcaaccggcagatcgtccggccgctggacgaagccctcgcgcaggccgaggccatcgccgccggcgacctcggcaagcgtccgcagaatcccctgaccctccagcgccgcgacgaactgggccagttgcagcgagtcatgcagcgcatgggcgacagcctgcgcgagctggtcgggcggatcggcgacggcgtcagccagttggccagctccgccgaggaactctcggcggtcaccgagcagacccgcgccggggtcaacagccagaaagtggagaccgaccaggtcgccaccgccatgcacgagatggccgccaccgtgcaggatgtcgcgcgcaacgccgaactggcttcccaggccgctcgccaggccgacgaagaggcgcgccagggcgacgcggtggtcgaccaggcggtgacccgcatcgagcgcctggctagcgaaatggacgtttccagcgaagccatggcgcgcctgaagaacgagagcgagcagatcggcagcgtcctcgacgtgatcaagtcggtggccgagcaaaccaacctgctggcgctcaacgcagccatcgaagcggcacgcgccggcgacgccggacgcggcttcgcggtggtcgccgacgaggtccgcggcctggcccagcgcacccagcagtccaccgccgagatcgagggcctgatccagcgtctccagcagggcgccggcgaagccgccgaacgcctggagaacagccgctcgctgaccgccagcacggtggaactggcgcgccgcgcgggcgccgcgctggacagcatcacccgcaccgtctccgacatccagaacatgaacctgcagatcgccactgccgcggagcaacagagcacggtggccgaggagatcaaccgcagcgtcctcagcgtacgcgacgtcgccgagcagtcggccgccgccagcgagcagaccgccgcctccagcggcgagctggcgcgcctgggcacgcagttgcaggcacaggtgggacgcttccgcctgtaacatcccgagaggatcctccttgcatcggcagcccctcccgtccatcgaaagcggacaggaggggcacctttgcgtaggatcaggctttcgccttttgggagatgacgccatgcgcccgatgaccatcgatatcgacgaactggccttcgccctggataccccgggaatcgaccactacctcgacctgtacagcggcaaggtgctgctgatctccgccgaggcgcccgatcccgaactggacgcaatgctggaaaacgagccggaacgcctgctgctgatcgacccgctgagcaccacccagtcgctgggactgatgcaggatttcctccgcgaggtggaagagccgcacgcctatgcgacgctcgccaacgcgctgcagagccgcaagccgttcaaggccttcaagcactctctgatggagtacccggaactgttgcaggactggtaccgctaccagaacgagcgcctgcgcgaatgggcgctggactggctggaggacaacgatatccagccggccgcgcggcagagtccgacgtcgctcctgccgccgccgggcaagccgttcgcctagcgcggtactagaggacctggcggaggaaggcctgggcccgcgggtcctgcggattgtcgaagaactgcgccggcggcgcgtcctccagcagcttgccgtggtcgaagaacagcacgcggtcggccacttcgcgggcaaagcccatctcgtgggtcacgcagaccatggtcatgccttccacggccagggtcttcatgacgtcgaggacttcgccgaccatctccggatcgagcgccgaggtcggttcgtcgaacagcatcaccttggggtccatgcacaacgcgcgagcgatcgccacgcgctgctgctggccgccggacaggcgcgagggatattcgtcggccttctgcccgatgccgaccttggccagcagcgcccgcgccttggcctcgcgctcggccttgccgcgcttgcgcaccacgcgttgggccaggcagaggttctcgagcacggtcatgtgcgggaacaggttgaaatgctggaacaccatgccgacttcgcggcggtaggcattgatgtcggtcctcgggtcggccaggtcgacgccgtcgatgctcaccgagccttcgtcgaactcctccaggccgttcaggcagcgcaggaaggtcgacttgccggaaccggacggaccgatcaccaccagtacctcgcccctggccacgcgggtactcacgtcgtccaccgcgcgcactacctggccgcgggtatcgaagaccttcagcaggttgcgtacttcaatcactttgtccgagcctccgctccagtcgggatgccatgtgcgaaaggggcaggttcaacagcaggtacaacgcggcgacgcagaaccagatctcgaaggtggagaacgaggtggtgatcgcctcgcggccgctcttggtcagttcggtgatggcgatcaccgagaccagcgaggtgtccttgaccaggctgatgaactgcccggccagcggcggcagcacgcgcttgaaggcctgcggcaggatcacgtagcgcatcgactggccggcgttcaggcccagggagcgggcggcctcgttctgtccgcgggcgatggactgcacgccggcccggatgatctcggccacgtaggcgccggtgaacagcgccagcgccgcaaccccggcgaactcgcgggacaggttgagcacggtgccgatgaagaagtagaagatgaagatctgcaccagcaacggcgtgccgcgcaccagttcgacgtagatcgtcgacaggtcgtgcagggtcgggttcttcgacagccggcagaggccggcgaccaggccgatagccagaccgatggcaccggacaccagcgatagccagagggtggtccacaggccccagagcagtgggccggcggcccagtggcgggtcaccccgaccgcgtcgccctcggccacgtcgtcgccttcggagaattgcaggctgtcctgggcgacggtcacgacctgcttctcgccgctctcgccaagcagcgtgacgcgcgcgtccctgccctgttcctcgatagcctcgacccggccgatctcgttggcccgtaaaggctcctcggcctggtaggcgaagtactgcggaacgcggttccagcgccattcataggaaatcagcgaggtggagaaccacagcgcccaggccaggaccagcaggatcagcccggtcagcaggtgccagggccagacggaacgtttcttcttggtcacggaaactctctcgaacgatggaatgcgcaggtacgacggcccccttcgcgggggccgtcagcggttcattccatttccttcagccactcggtgttcttgaaccacttgtcatggatgcgctgataggtgccgtcttcgcggatctgatggaggaagttgttgatgaaattgatgctgtcgtagtcgcctttcttcaggccgaacgccagcggctcgtaggtgaacggctggtcgaggtagaccagcttgccggcgccgaacttgctcaccgccaccacgttgtagggcgagtcgtagatgaaggcgtcagccttgccgttgaccacgtccatcaccgcttccggctcgttgtcgaagccgtggtacttggccttgctgatcagcttgcgggcaacgatctcaccggtggtgccgatcttcgaggtgatgctgtactgcggatcgttcaggtccttgtaggacttgatcttgccttccagttccttgcgcaccagcagggtctggccgaccacgatgaagggctcggagaagttcaggcgcaggttgcgctcctgggtcagggtcatgcccgagccgatcatgtcgaacttgtcggtcagcagcgccgggatgatgccgtcgtagctggtggagaccagctccagcttgacgcccatggacttggccatggccttgagcaggtcgacttcgaagccaatgatctggccacgcttgttggtcatctcgaacggcatgtaggtcgggtccatgccgacccgcagggtgccgcgcttgaccgcgtcctccaccgcgccggccgcctggaccgaagccacgcccaccagggcgcagacgcccagaaccaatgaagcaagatactttttcattccccaatccccagcagtcttagaaacacagtcgtcgaacggatgctctcgtcgtgtcgccgtcccgggcgggcagcaggccatgaccggctgcgcaaaaggcggccgatagtacctcagctggcgaacgatacgagactttctggattgccggcgcagggtaacagcagcgccgcacggggaaaacaggcaagaaacagaccatgcccccggcggcgttccgccgggggcatgggatcaggactgggcggcgggcagcaagccggcgtcgccgggcactacctgggccagcggtacgctggcggcgtgggggtcgtccgcctcggccttgcgccagcggccgagccagtcgtcgcggtcctcttcccagacccgcgtatgcaggcgcgaaagtgctaccgggtcactcaacagagccaggcgcgtggcgccgtcgagctgttccgggcccttatcgatggccttgccgatacgctcgccgcgcaccgtctcgatggcctgcgcacggttgtggcgagccgtgcccatggcgcaggccagggcgttgagcaacggatcgacggcggccttgaggaagccatccttgagcgcatgccagcggttctcgtaggtgtactcgtcggtggcgcgcagctcgcgcggcgtgtcgtactcctccgggatcaggaacagcttttcgtcgcgggcgcgcaggcccagcttcacccggctggagatcaccgataccgggatcgacaggatcagcgaaccgacgatcggcgacagccaccacaggaagcgcgggttgagccaggccaccagcagggtccaggcgatacccagcagggtctgcatgccgtgccggcggatcgcctcgctccagggcgtggcgtcgtcgtcgcgctgcggcgagttccactgcaccgaccagccgaggaaggcggccagcacgaagcgggtgtggaagagcatgcgcaccggcgccagcagcaccgagaagaacatctccaggagcatgctcagggtcacccggatcaccccgccgaaacccttggcgcccttggcccagatcagcattacgctgagcagcttgggcaggaacaacagggtcagggtggtggagaacaacgcgatggccttctccggatgccactgcggccagatcgggaacagctgccgcggttccaggaagtactgcggctccatcagttggtgcaccgccagcagcgcggtggaaagcaccaggaagaagaaccacaacggcgccgacaggtaggacatgaccccggtgaggaacaccgcgcggtgcaccgggtgcatgcccttgaccaggaacaggcggaagttcatcaggttgccgtggcaccagcggcggtcgcgcttgagttcgtcgagcaggttcggcggcagttcttcgtagctgccgtcgaggtcgtaggcgatccacacgccccagccggcacggcgcatcaacgcagcctcgacgaagtcgtgggacaggatcgcgccggcgaacgagcccttgcccggcaacggcgccagggcgcagtggtcgatgaagggctgcatgcggatgatcgcgttgtggccccagtagtgcgactcgccgagttgccagaagtgcaggccggcggtgaacagcgggccgtagacgcgggtggcgaactgctgcatgcgcgcatacagggtgtccatgccggacgccttcggcgcggtctggatgatccccgcctcaggattggcctccatcaggcgcaccagcttggccaggcagtcgccgctcatcacgctgtcggcgtccatcaccaccatgtagcggtagtcgccgccccagcgccggcagaagtcgtcgatgttgccgctcttgcgcttcacccgacgccggcggcgacggtagaagatcttgccgaagcccttggtctcgcggcacagctcgagccaggcctgctgctcggcgacggcgacatccgggtcgttggtgtcgctgaggacgaagaagtcgaagcgctccatctcgccggtggcggccatcgactcgacggtcgcccgcaggccggcgaatacccgcggcacgtcttcgttgcagatcggcatgacgatcgccgtgcgggcgtcggcggcgatcggctcgctgccggcgctgctgccggagatccggtagcggtcgcgcccggtgagcagctcccagaagcccatcagcgcggtccagaagccggccgagacccagcagaagaggatcgcgaagagcgccaggatgccgaactggatgacatagggcagcacctgctggacggtatccagcaggctctgctgggccagctcctccaggtcgacgaaggcccagccctggtagggcaggatgcctttcatgtagtaggtggcgaccgaggtctgcgccagcatcaacaacagcaggatgaaccggcgcagcgagccgacccgctgccagcgggcccgcggcagggcacgcttgggcttgggcgggttgctgcgtccggtcagccgacgccagccgcgcaccaggatgttggtgcgccagggctcgggaatcaccttggtacggcggatcggcggggaaatcttgaggaaggtgcgaccctgggcgtcgacgccgaacatctcggcgtcgtccagctcaggggtgcccagctgcaggcgggcgcgtaccgaggccagggcgggatcgcccccggcatcggcagcggcgccttccgctcccgccaggcgagcgtgcagctcggagaaggaagcggactcgccaagccgctcccgctcctcttccgccaggggaagatgagcgaggtagtcggccagcggtgctttcgtagtggatgggttattcatcggcaggcagctgatagctccaggtttcgctcagtggcttctgcgcctcgtcgaccagcgccgcgcgcatttccaccggcttcttcggatccttgaccttgatccgcagcgtcaggcgccagcctctcaggaccgggttgtaacgcaggctgttctccaccacctcggcgttgctgtcggtgctgacctgggtggtcaccggcgcgtccggcgccaggtccttcagggccggcccttcgaagtcgacgaccagggcggtgctgccgtcctgctggcggatcaggttcttctgcttcacgtcgccgaccgagcgcatggtctgcttgacccaggaggatttcgggtcgtgcagctcgtcttcatccatggtccagtgcaggcggtaggcgaagtccagcggctttccgacctcaggctgggtctcggggttccagaatgcgacgatattgtcgttggtttcgtccggggtcgggatttccaccagttccacggtgcccttgccccagtcgcccttcggctcgatccaggcgctcggacgcaggtcgtagcggtcatccaggtcttcgtagcgggagaactcgcggccgcgctggagcaggccgaagcctttcgggttctccacactgaaggtgctcaccgacaggtgcttcggattgttcagcggacgccacagccactcgccgttgccggcatggatctgcaggccgctggagtcatgcagctcgggccggaagttgtgctgctcggacggctggttggagccgaacaggtacatgctggtcagcggcgccaggcccagtttgctgaccttgtcgcggaggaacacgcgggcctggacatccatcaccgcatccttgcccggacgcagcacgaagcggtaggcgccggtggcccgcggcgagtcgagcagggcgtagatcaccagttgcttgtcctgcgccttcggccgctcgatccagaattcgcggaagcgcgggaactcttcgcccgaaggcagcgcggtatcgatcgccaggccgcgcgccgacagaccgtagacctggcccttgccgaccacgcggaagtagctcgcgccaaggaaggtggcgatctcgtcctgcttgtcggccttgttgatcggatagagcacgcggaaaccggcatagccgagatccttggtggcattctcgtcgaacttcagggatccgaaatcgaacttggtgcgatcgtacttgatcggcttgaccgtggtagcggtcacctcgttgatcttcaccggcgtgtcgaagtgcatgccctggtgatagaagctcagcttgaacggcgtcttcagcttgccccagtaggcgcgctcgttgatgaaacggatctgctggtaatcggcgaatttcatttcgctgaattccgatggcaggttgctggtcggcgcggaatacttgtcgccggccaggtccttggccttgctcgccacgtcgtcgatgctgaacgcccataccggggcggcgacgaatgccagcgcggtcgagccggcaagcagcagggtgcgcacgcgggcgcggaaatcggtgtttgaaacggaacggaaaatcacgaggccccctcgtccgtgaacatgaattactgaagacgccctgaccgttcaggggtctccgacggcaccggagtgccggtcgaacatggtttcgccacattcgctgccaaacccgatagatagccagatttggcgcgatctgacaaaaagaatgcctgtttccagtcattcgcgttacgtgcaccgggcctggaagaccagggggcatgccgctcgtcggctagcgaccccagaggttccgaccctgcccgggcggaatgattcccgtccattgggttgcaggacgccccgcccggcatcgggatgccggccggcctgtcctgtacagcatgaaatcggcgtgcggatgatgcaccgaggttgtgacaaaaggccatgtatctgtcacaaaaattcaccgttccggccccgccatccctccctgaagcaccttggggaaaatcccctcgacgccgatcaactctccagcaggaaggtcaccggcccgtcgttgaccaggtgcacctgcatgtcggcgccgaaacgcccggtcgccacctgcggataggcctcccgcgccagtttcaccaggtgctcgaacaccgcctctccttgcgccggcggcgccgcgctggagaagctcggacgcagtccgctgcgggtgttcgccgccagggtgaattgcgagaccagcagcaagccgccctgcacgtccagcaaggaccggttcatcttgccctcttcgtcgccgaacaccctgtagttgagcagcttgtgcagcatcttcgccgcgcaacgctcgccatcctcgggctcgaccccgaccagcaccagcaggccgcgatcgatggagccgacgatttcgccgccaacctccacccgcgccgcgccgacgcgctgcagcaatgccttcattcggcctccggcggcaggtcgagcagtcgccggccgatctcgttggtggcgcgcaccagcgcatcgactatccccggctcgctggcggtatgcccggcgtcgcggatgatctgcagttcgctgttcggccaggcctggtgcagggcccaggcattgtccagcggacagatggcgtcgtagcggccatgcacgatcacgccaggcagatgggcgatgcggtgcatgtcctcgagcaactggttgggcctgaggaagccctggttgacgaagaagtggttctcgatgcgcgagatcgacagcgccctgcccggctcggtgaagcggtccaccaccatggggttggggcgcagcgtggcggtgcggccctcccaggtcgaccaggccttggcagcgtgcatctgggcgatctggtcgctaccggtcaggcgcttgtggaaggccgccagcaggtcgccgcgctcttccggcgggatcggcgcgacatagtcttcccaatagtcggggaacaggcggctggcgccttcctggtagaaccagtggatgtcctgcggacggcagaggaagatgccgcgcaggatcagcgcatggacccgctcgggatgggtctgcgcgtaggccagcgacagggtcgagccccaggaaccgccgaacagcacccacttctcgatacccaggtgctcgcgcaggcgctccatgtccgccaccagctcccaggtgctgttcttctccaggctggcgtggggcgtggaacggccgcaaccgcgctggtcgaaggtgacgatacggtagaggttgggatcgaagaagcgacgcgacagggcatcgcaaccggagccggggccgccgtggacgaagacgaccggcagtccgtccggcgaaccgctttcgtcggcatacagcacatgcggttcgtcgacggccagctcgtggcgagcgtagggtttaatttccggatacagaactagcatgatgcgctcccgaggcgatgtgttcggcccccggcgcaaacgtcgacagcggggcccgtcctttgctctgccgcgcatgatacttcggcgccgggaaaaaaaccgagcggctttcatgtccgccccggtagaggggaaaccatcaatccaagcaacggcgcctggcgccgggagaacgagcatggccgaggccttgcgacaccgtatccgcgccgccggcctgctggtggtggagcaacgcatcctgctggtccgccacgaggtcggcggcgacatctactggattccgcccggcggcggcttcgagtcggaatgcgacgaatcgacgaaggataccgtccggcgcgagtttttcgaggagaccggcctgcgggtggacgtcggcccgctggtctacgtgcgcgaattcgccgaacccgccgccgggcgcttccacatggagctgttctaccgcatcgacgcctggcgtggcgagccgaccctggccaacctgaagggcctgggcggcgacgagttcgatatccgcgaggtcggctggatcgcccgcgacgaactgcctggcctgccgtcgttctatccggccgaactggccgacgacgtctggtcgcgcctggacgcgccgacgccgtcgatccgccacctcggcctgcagcgctagacgctcactgcaccggatcgctggtggggttctcgaggatcgccttcagctccgcggtcatgggaaactccaggttcaaccccttgggcgggatcggctgctggaaccagcgctggtagatgccctgtatctcgcccgagcgatacagcccggccagggtctcgttgaccagggcaaggaactgcgggtcgtccttgcgcaccatgcagctgtagatctcccgcgattgcggctcgccgaccaccacccagtcgtgcggctggcgcgccttggcgcgttcgccgtagagcagcgcatcgtccatgtagaaggccaccgcgcgacccgattgcagcatctggaaggcttcgccgtggtccttggcgctgaccacgttcatccccagcttgtgttcggcgttgtagttcttcaggtagcgctcgttggtggtgccggcggtggtcaccacgttcttgcccttgaggtcgtcgaagtgggcgatgccgctgtccttgcgggtcagcaactggcccttgacgtagatgaagccgtaggagaacgccacctgtttctgccgctcggcggtgaccccggtggagccgcactccaggtcgacggtgccattctgcaccagagggatacgggtctgcgaagtgaccaggttgtacttcaccttgagttccggcttgccgagggtgcttttgagccgctccaccaccttgtcggccagttccaccgaatagcccatgggctggccgctgttatcgccaaggtaggagaaaggcaccgaggcatcgcgataacccagggttatcgtgccgttgtcggcaaccttcttcagggtgccgctgagttcctcggcctgcgcggcgccgatggcgagcgacagggagagtgcgagagtgctggatacaagaattttcatcggaggttctgcctcttttttcttatggctatggaaagtaagtcagcccctggccgccaccacggtgatctccaccagcaccgacggacgcgccagctccgcctggacggtggtccggctgggcgcctggccgatcggcaaccactgggtccagacctcgttcagggcggcgaaatcgcgggcgatgtccttcaggtagatggtcgcgctgaggatacgctccttgcgcgacccggcctcggccagcagcgcgtcgatcttcgccagcacctcgcgggtctggccatggatatcctcggcctggcccggcacctggccggaaagaaataccagggcgtcgaagcagaccgcggcggacaggcggtcgttggtggcgatacgggtcggttccatgggagtgctccaggtcgaggggaattcagccagccagcgcgccgcgcggaagcaggccagaggtatcgatgctcggcgggcggcggccgatctgctcggccagcaggcgcccgctgccgcaggccagggtgaagccgagcgcgccgtggccgaggttgagccagaggttgcggtagccgccgttgcccaccagcggtaccccggtgggcgtggccgggcgcatgccggcccattcgacggcggcgtcgaaatcgccgccctgcgggaacgtgtcccgcgcctgctggcgcagcagtgccaggcgcgcgggctcgaggccggggtcgaagccgacgatgtcgaccatcgcggcgatccgcagccgctcgccgattcgcgcgtagacgatcttgcggtcgtaatcggtgatgctggtatccggcgcgcggtgctgcgcaccgaccggcagggtcaggctatagcccttgagcgggtatagcggcaggcgcaggcccggcagcatcaattcggcgctgcggtagccggcggccagcaccacatgatcggcctcgatgagatcgccgccgacctcgacgccacgcaccgccgcgccgccctcgacgatcttcgtcaccctgcggccatgcagttgccggcaatgtccggaagcctgcaggcgctcggcaagttgcacgcagaaggcatggcagtcggcgacctcctcgtccggcgtgtggatgccgccgacgaagggcgcggcggacagggccggctccagcgcgaggcactcggcggcggtcaggacgaattgcgccgaaggatcggccagaccctggcgggcccgcgcaaagctggccggttggcgaaacgccaccagcttgccgttgcgccgccagtcgaagccatcgaggccatcctcctcgcgccaggcctgcagggtgcgctggctgagcaatgccaggcgcagcaggtgcgcggcattgcggcggttcagcgagccgcggcaggccgcgaggaagcccagcagccagcgccactgcgccggatcaaggcgcggccgcaggcgcaacggcgcatcgttgcgcagcagccagccgagcgtctgggccggcacgccgctgtcggccaatggcgccacgtagcgataggacaactgcccgccattggcgtagctggtttccagcccgccccgctcgcgcgcttccaccagggtcacgtcgaatccttcgcgaaccagggcgtaggccgtggccaggccgaccacgccggcgccgatgatgcaaacccgctgagccatgacaatcgttatccaggtgttttccagggcttcgacgataggcgcggatgacagcggtaggacaatgaataaagatggccagggtataaatccaggttatgggatcgcgccgatgaagctccgccatatcgaagtgttccaggcgatccgccaggctggctcggtcagcggcgccgcacagttgctgcatgtgtcccaaccggcggtgagcaaggtcctgcagcacgccgagcagcaactgggcttcccgctgttcttgcgagtgcgcggcaagctgctggcgactccggaagcgctggaactggagcgcgaagtggccaagctcagcgatagcctgcaggcggtgcggcgcctggcgcagaacctgcggcgccaaccgggccacagcctgcgcatcggcgccaccccggccctggcgctgtcgctgctgccgcgggcgatcggcgaatggagcgcgcgctatccgcagagcggctgcgaactggccaccttgcattcgcgcgagctggtgcagggcctgctgatgcgcgaactggacctggccctgagcctgaagcagccggaacaccccggcctgcgcggcgaagccatcgccagcggcgtattggtggccctggcgccgcgcgaacactggcccgaagcggaacgccggcagccgctgagcctggccgggctggccggcgaagcgctgatcgggctgtccaccgccgacccgctgttcgcccgcctggaggattacctcagcgccgtggagccaccgccgcaggtgaagatcgccgtgcagacctacgccctcgcccgcgccctggtggaggctggggccggcctggcgctggtcgatcccttcaccgccctcggcgccgacccgcacagcaccgcaatccgcccattgagcccggccttcccggtcaccctctacgccatcacccgcgccgacgaaaccccgccgcacaccctagctccgctgctgcggatgctcgcccgccaggccgaggagcgtttgcgggccgtgcagatgtagcatttgccgcctggcctgccgctggaaaccttggacgtcgttctggcccacgcctcgcgtacttaccgctccggcttccagtctgggcggtccacgtcgtagccttgggtggggtgaggaggcagaggatggtcctctatcaagttgggaaaacgcaaatcaggatcagcggcaagttgatcgtaaataccatcatatagtttgtgcagcttctcatcgggggcgtaccacattctatcgacatcaggactggctttatcaaaaacaccggagataaataaagccgcactctttccgccctgagagactgacgcctgataataacccaatgcttttggaaaattatgctctactatcttgtaatacgcccccaactcataactagccggcgcatggccctggctagcagcacagtgagtatacgccaaccccaaatcattttttttggccacatatatatagagcttacctagctcggttagtgccggcggacttcctaggctagcagccttatcaagaaaagtaagtccgtcagttgcagggtttttaaccccggcgcgatttccaatcattgcccccatatcatagaacccctgaggcacatccagatctatcatcttttgatagagatccaatgccttctgcgtatctttttctactcctccgggccaccctgtacgataaagattcgccaggttgtgcatggccttccagtggccgcgctcggccgccttgctgtacaacccgacgatacgaggccacggacgcaaggtatcgggcttggccagggtcgccgcttcgcgataccaagcatcggcctgcgggtccagagggggtagatggtccttttcgttaacgcagacaaaaggcttgctgtcagccatagcgggaactgctgcgagacaaagtacagcccatattccaatagccattatccgaatcactgacccggcttccagtcgggtcgagctgcgtcgtagccctggacggggtggggtggcaaggggttatcttttaccaaattgggaaaacgaagatcggggtcggcatcaatttgcagatagagggagtagtagaatttctcaagcttttcatccggcgtataccacattgcacttgaaggaggcgtcctctttccgaagacgcgcgagagaaaaaaggctgcactcctgccgccttgagagacggagacttgatagtagccaagtgcctttggataattatgctcaaccaactcatagtagcttccaagctcatagctcgccggagcataaccttgactggaagcacaactggtatacaccacccccaattccttttccttggccacataaatatagagtttacccaactcggtcagtgctggcgggttccccaaactagcggctttatccaagaaggtcagaccatcggtagcagggttcttaacaccggcacgattaccaatcattgcccccatatcatagaacccctgaggcacatccagatctatcatcttttgatagagatccaatgccttctgcggatctttttctactcctccgggccaccctgtacgataaagattcgccaggttatgcatcgccttccagtggccgcgctcggccgctttgctgtacaacccgacgatacgaggccacggacgcaaggtatcgggcttggccagggtcgccgcttcgcgataccaagcatcggcctgcgggtccagagggggtagatggtccttttcgttaacgcagacaaaaggcttgctaacagccatgacaggaagcgctgcgaagcaggatgcgaccaacgcaccaataatccaccgcacagttgtcactctggcttccagtcaggccgatcggcatcatagccttgcgttggatgtggaggcagaggatggtcttctatcagatgggggaaacgtaagtcagggtcggcctcaagctttttgtagattgaataatacgcttcttgcaacttttcgtcgggggcgtaccacattgcacttgcaggaggagtctcacttccgaagactcgtgataggaaaaaagccgcgctcttgcccccctgagagactgacgcctgataataaaccagtgcctttgggaaattgtgctccactatcttgtaatacgcccccaactcataattagccggcgcatagccctggctagcagcacagtgagtatacgccaaccccaaatccttttttttggccacatatatataaagcttacctagttcggttagtgccggcggatttcctaggctagcagccttatcaagaaaagtaagcccgtcagttgcaggattcttgacccctgcacgattgccgatcattgctcccatatcatagaacccttggggcacctccagatcgatcattttttgatagaggtccagtgccttctgcgtatctttttctacccctccgggccaccccgtgcgataaagattcgccaaattatgcatcgccttccaatgcccacgctcaactgccttactgtataagtccacaatacgtccccaaggacgcaaggtgtcaggcttagctagcgcaactgcttcccgataccaggtatcggcctggggatcgagaggtggtaaatggtctttctcattaacacagacgaacggcttactgtcggccatagcaggaactccgaaactcaacaggaaaatgaatagaccaatagagcttcgcattactcagtccaccgtaagattgggactatagggcgtggtgacatcccagaaacgcagcaagtgcgaggtaaaaggctcatctgccacttgggccttccagttatcatccatcttctgactccacagttcgaagttgtcttcgatcgttttggcaacttcataagcatgtgccccccacaactcctcccgcatcgccctcgccaaatccggattgggctgggcaatccccaactcgctgtcgccatgcatgctgcggacattgatattggccgagctgagcagggtatagaggtcgtccaccagcagcagcttggagtgcacgtagatgtgtttgtagcgcgccttcagcggcggcgccccgagggcggcctcggcttcggcggacaggcgcgctggcggcgggctgccgggggcagggtcactggtggccagggtggcgacgaccaccttgaggccgggtacttcggcgagttgatagggcttgtcgtcctcgccggtgttcttcgccagtccgggaatctcctgcgcgccgagatcgccgaggcgttgctcgacttccggcgtcacgcctttctcttcgagcgcctcgatcttgcgctccagccgttcgatgttgttttcctggccgcgccggacatagggatcgggatgtaggttttccctgacctgcttcaactgctcccgcttttcccgcaagtcatgcgccaggtcgcgctgtacctgcggcatcagttgctcctggcccaggcctttcatcatgtcgtaggtggtcttcgaggcgtcgctggagtcgggggtgttggtcacgacgaacaggtacaggtcgccgggcacgccccgggccttgcgcacctgcgcagtcttccgcaggcgctcggcgaagccggcataacggaagtactggttttccatgtagacgtagtcggtggcattgcccagggccttgagatagtgctccaggatcgagcgctcgtcgtcctgcggctgggtccggcaaatctgcgcgacgctgttgctggcgggcgtggcgatcttcggcagcggcaaggcgtcgcgctcggcggtcagcgatggcgtcgagaaccagcgcttgtaccacggcgtctcgaggtcccaggcctcgctgaagttgcggctgaggtcggccagcaccgggccctggacctgcatggagatatcctgccagggcccgaacccgggatcgcgaccggcggcgcggtcgtcgaacaggtgggcgctggtgtcccagtagttgcggtgcatgttgtgacccatgacgaagccgatggcctgcgggctgccatagtcgaccaggaccatcttctggtgatggctggcgaactgggtgagtaccagcaactggccgatgcccaggtcgtcgatgccatcggcgcgcagcaggtggatcaggctttgcagtcgcccattgacgaggcgcacttgctcgccgttcatcaccggtctggccgtctgctcgaagtcgcgggtacggaactcgacgttctgcaacccaccgccgcgtaccgccttgaaccagtcgcgggtgaatatctgcccccagggatcctggcgggtgccgccggaaccgcgcttgccgccgtagccctgggcctcgctgctgtcgagagtgcgctggatctcggcgttctccgcctccagctcggcgatgcgcgcccgcgcgtgggcggcgccccgcgggtcgaagctcggcagcctgccttcgcggtgcagccgttccgagcgctccagggcttcctgctgccgcgcgatgaggttgaggttatgctggcgccgctgctccagtcgcagcacctcgttgtccaccgcgctgccgctggcgacgcccgagcccgcccaggtgccgccggaaccgccgacgccggccccggggatggtgttttccttgagcctggcgagttggttgctccagaccagcactcgcgcctgcactccttcgcggcccttcgtctgcagcaattcgccgattcgcggtccgtcggggcgtttgaaacgcatggccgggtcgaagccccaggtgatgatgtcgatgctgtgccgggccgcctccatcgccgcatgcaccgcgtcgaaggccgcctggccattgatcagcggcttgatgtgcacacccgcgcgcggcgggtagaaagccttgttggcgaaccagtcgagggtcagccggacgctgccggcctgttgcgcgtatagcttgagggtctgcggtttgtacaggtcgctcatggcgtgggctcatccttgtcggcggcgccgggccgcgaggcgtcgcgccggtaggcgtccggggcggaacgcggcttgtgctggggcatttccgcccggtagtcgcggaacccctgctgggcgagccgatcgtcggcctgcagtgcgtccggctggtcgaccatctccacttcgtaggcgtggccattggcggtctcgatgcgataggtgcgttcgcccggcagcggttcgaagctgattgcgccgccttcgtcggcgatgccctcctccttgaaggcaccattggcgtagagccgatacggttgcctggccgccgatggcacaccgggcaacggactgagttcgaaacgcaggagtttctgcggcgcttcgccgaccttctgggcgatggctcccaacaaggcgcctcccgccgccgcggcgtcggccgcgagcggttgcagcggcgacagcgcgcgaacgccgctaccgatgccggggctgccgccgctgttgatcatcacctgggcgccgtcaagggtgacaccgcccgggtcgagcctggcgaagctgccaccgccctttagggtcaactccatgcctgcctcgatcactaccttgtcgccggccttgaaatggatctcgtcgcccgcctcgacgaactggccggtgccgatcctcaggtgcaacgcgtcggcgacgctgaggtggtcggccgccttcagttcgaccttgcggtcggcatggaccgtgcgctgttcctcggccctgaactcgctgtagctatcgccctcgaccgtgtcgtggcgctcgtggccgacgcggatcttctggtcgtgctcgatgttctcgtcccagtcgcgctgggcgtggacgaagatctgttcctggcccttgcggtcctcgatgcgcagttcgttgaaaccgccgccgccggggtagctgtcggtcttgaaaacgctgcgggtcttgttctgcggcagctcgtagggcacccggttttcgctgtggtagaggcagccggtgaccagcggctgatccggatcgccctccaggaaacccaccaggacttccatgcccacccgcgggatggcgacgccgccatagcgtttgcccgcccagttggaggcgacgcgcaaccagcaactggtgttgtcgtcggcctggccgaggcgatcccagaagaactgcaccttgacccggccgtattggtcgcagtggatggtctcgccggtggggccggtcacgaccgctgtctggcagcccagcaggcgtggcctgggatgctccagcgggggccggaaatgcgcgctccagggagtggcgacgaaacggttgcgatagccctggcggaaatcgccccggccctgcgcgacgtcgctgtcgatcgactcttccagtacctgcggctgccgcccttcgtggagaacctcggtaagcagccagagatcgttccattcgccgcggggatgcgcggacagcgtcaggaagtgtccgctgagcagcgccggttcgtcgctttcgcccctggcctgtaggtagtcggcgcgatgccgttccagcgcgcgccggctcaggtgcttgccgcgctcgcggtgggtgaagcggccgggatagtcgtagtcctccaggtccggttgctgcgccccgggctgcgggccatgggcggcctgcatctgcaacgcgggttgctcgaagtcgtagtcgcgccgggtaacccggctggcacgggtgtcgaagcgcacgccgaagcgcttgaccaccggctggtcggcgaccagcccggcgtcctgcacgtaggcgacggggcgttgcagccgcggaaaggaggtctggtcgtcgccgaagaccagcatatggccctgggcagaaaactcatggtggtaatggatgccttcctcctcgcagagcctgctgaggaacgccaggtcggtttcgtcgtactgcgtgcagtattcgcgggccgggtacggcgtcgggcccagctggaagcggtaggcgtcggcgagaatgccgtggccctccagcacccgaccgatgatttccggcacgctgaggcgctggaagatgcgttggtcgctgcacagccccaggtaggccaggcgcggctccagggtcgcgcgatagccggtcaggcgcttgccggagtccccctgggcgatgctggtgagctgtccgtggaccccttgcccgctcggcgagaggatcaggaaggccggctggtgcagcagcgcgtcgaggtccagatcggatcgctcgctgaccagctccaggtcgaagcgaaagggctggctgatggcttcgcgaccgcggaaggcgagtacctggaagtcgtgccggaggttttcgatgcgaaggctgaagtgcgtctggttggcgggggcgaacattcactgtcctcttggaaacgcagccgtgcgttcctggcgtattcggttccgggcgcgacgcgcctgcgcccgcgcgatggaaatgctggccgagaggatagaggagaacagttgtgcaactctttgcgcactcggcctcccggccgcatcaacgctgacctcaataaatttgtaacagaaaatttccagaatgccgacacggacgccccaccccatccgcggcattcacgtccgccaggacgggccaggcgtccgccgcctccgagcacctcaggcgtagcgctcgcgaccccaggcgaggaggctttccagcagttcgcggatgactgcgcgggtcgcttcggcgaggtccgcgcggtaagcgaacggggcctgctcgtccatgtaggtgcactgcgccagctccagctggacggcatggacgtgctgctccggctggccgtagtggcgggtgatgtggccgcccttgaagcgcccgttgagcacatggctgtagccttcggcggcagcgcagaccgcctccaggcgggccgccagcgctggatcgcaactggcgccggcgttggtgccgagattgaagtcgggcagtcggccgtcgaacaggtgcggcacgtgggaacggatcgagtgggcgtcccagagcagcgcgtagccgaactcggccttcagccgcgccagttcctcggcgatggtccggtggtagggcgtccacacttcggccaggtagcgcatgcgttcctcggcggacggcgccatgccttcgcggtagagcggccggccgtcgaacagggtgtccggatacaggccggtagtggcggtgctgtacagcggcttgtcgtcggaagggcggttgagatcgaccacatagcgcgaatagtgggcagccagggtgctggcgcccagttcctcggcgaaatcgtagagccggggaatgtgccagtcggtatcggtcagcgcccgcgcctcctccaccaggccggcgtccaccgccggggtcaggcgcgtgccggggtgcggcatgctgatcagtagcggcacacggccgcgcttgaaactcaggacttcatccacggtatacctcctcggcgtggcgaatgacgcgtttcggcagatcgccgcccagccagtaggccagctccgccggacgctcgatgtcccaggcgacgaagtcggccagcttgccgacctccaggctgccgtgactggcttccagccccagcgcccgggcggcgtgcagggtgacaccggccagcgcctcctccggggtcaggcggaacagggtacaggccatgttcagcatcaggcgcaacgacagcgccggcgaggtgccgggattgagatcgctggcaatggccatggccacgccgtgccggcgcagggcatcgatcggcggcagctgggtctcgcgcagcaggtagaaggcgcccggcagcagcaccgcgacggtgcccgcctcgcccatggcgcgggcgtcgtcctcggtcatgtactccaggtggtcggccgacaaagcccggtagcgcgccgccaggctggaaccgtgcagcgaggatagctgctcggcgtgcagcttcaccggcaggcccagctcgcgggcggcgatgaatacccgctcgacctgcgccggggaaaacgccaggtgctcgcagaaggcgtccaccgcgtccaccagtccctctccggccagcgcggggagcatcgtcgagcagatatgctcgatgtagtcgtcggcgcgcccggcgtattccggcggtagcgcatgggcggccaggcaggtgctgcgcacggtcgccggcaggcgttcgccgaggcggcggatgactcgtagcatcttgcgctcgctggccaggtcgaggccgtagccggacttgatctccagcgccgtcacgccgtcgcgcagcaagggctccaggcgcttgcgcgcgctggccagcaattcttcctcgctggcctcgcgggtggcgcgtacggtgctggcgatgccgccgccggcggcggcgatctcggcgtagctgacgccctccaggcgctgctcgaattcgccgctgcggttgccgccgaacaccgcgtgggtgtggcagtcgatcaaccccggggtcagccaggcgccatcgaggtcgatgcgttcggcgtagtcgtcgggcggcagttcggcgcgcgggccgatccagtggatcagcggaccgtcggtgaccagggcggcgtcctcgacgatcgagtacttgccgcccttgagggtggcggcatggcaatgctgccagagtcgtttcattgcaggtctcctatgctcgcggccagccgggcgagactcttccgctcgccgaggatggccgccgcgctggcgatgtcgggagccagccagcggtcggtgtcgtacgcgggcacgcgctcgcgcaggatgccccaggccgccgcggtgccctggccgaagcgttgcggggcgaggaattcgaaggcctgggcggccagcaggtactcgatggcgaggatccgccggaggttctccagggccctgccaagcttgagcgcggcactggtgccgaggctcaggtggtcctcctggagcgccgaggtgacgaagttgtcgaccaccgccggctgcgccagctggcggttctcgccagccagggaggcggcgacgtactgggtgatcatcatccccgagttgactcccggcttgcccaccaggaacgccggcaggccgctgaccagcgggttgaccaggcgatccaggcgccgctcggcgaccccgcccagctcggccacggcgatcgccagcaggtcggcggccatcgccaccgattcgccgtggggattggcctgggataccacccggtaggcttccggcgtacccagcagcagcgggttgtcggtggccgagttgagttcggtctctatctgccgcgccgcgtgggccaactggtcacggcaggcgccatggatctgcggtatcgagcggatgctcagggcatcctgggtgcggatgccgcgggcgttctccagtacctggctgccagccagcaaggctcgcagattggcggcgacccgctgcatcccgggatgcggcttgagcgcaacgatctcggcgtcgaacgccgccagttggccgcgcagggcctcgaagctcatcgccccgatcacgtcggcccactgcgccaggcgctgcgcgtcgtccagggccaggcaggcgaggccggtcatgcacggcgtgccgttgaccaggcagagcccgtccttggctcccaggcgcaccgtcgccaggccttccgccgccaacgcggcggcggccggcacgacgctgccgcggtagctgacctcgccgatgccgagcagggcgatgccgacgtgcgccatgtgggtcaggtagcccaccgagccctgggccggcacctgcggggtaatgccgtggttgagcagcgccagcagtccttccaccagcgaacggtcgagcccggacttgccctggctgtagttggcgacggcggcacagatgatcgcccgggtctgttcgtcgcgcagcggctcgccgaccccgcaggcatggctgagcaaggtgttgcgcgacagctcggcgagctgctcgccttccagcaggacgtcgcacagcgcgccgaggccggtactgatgccgtaggcacgctcgccgttggcgacgatacggcagacgatggcgcgggcgttgtcgatccgtgcccaggccgccgccgacagttccaggcgcgcaccgtgccgggccaccgcgaccagttcctgccaacgcagcgggccgtcgccgaacacgacgctcggtaggtcgctcataggttcgccacccgccgctggacgaagcggtcgacgtagtcgtcggccggctggtggaggatttcccgtggcgtgccgacctggatcagttggccgtccttgaggatcgcgatgcggttgccgatgcgtaccgcctcgtcgaggtcgtgggtgatgaagacgatggtcttgtgcagggttttctgcagttccagcaactggtcctgcatgtccgcgcggatcaacgggtcgagggcgctgaaggcctcgtccatgagaatgatctcggtgtcggcggccagcgcgcgggccaggccgacacgctggcgcatgccgccggaaagctggtgcggataggacttctcgtagcccttcaggcccaccgtggcgatccagtgcagggcccgctcgtggcactgcgcccggctttcgccgcgaaccttcaggccgtaggcgacattgtcgagcacgctcttgtgcggcagcaggccgaaactctggaacaccatgctgatcttgcgccggcggaattgccggagggcttccatgtcgtagcgcaggatgtcctcgccatccaccaggatctcgccgctggtggggtcgatcaggcggttgaaatggcgcaccagggtcgacttgccggaacccgacaggcccatgatcacgaagatctcgccagcaccgatggtcagcgacaggtcgttgacgccgaccacgcagccggtctgcgccagcacttcgcccttgctgcgtccctggcggatcaggaccagcgcggcatcggcgcgcgggccgaagatcttgaacacgttcttcacttcgatcttgttcatctgcgcaccgctcatttgctcgtctcgtgccgggaacggccataggcctgggtgatgcggtcgatcaccaccgcgaggatgacgatcgccaggccggcttccaggcccttgcccacgttcagcgtctggatgcccaccagtacgtcttcgccgaggccgcgggcgccgatcatcgaagcgatcaccaccatcgacagggccatcatggtggtctggttgatccccgccatgatgctcggcagggccagcggcaactgcacgccgaacagctgctgccagcggttggcgccgaaggcgttgaccgcctccatcacctcgctgtcgacctggcggatgcccaggtcggtgaggcggatcagcggcggcgcggcatagatcacggtggcgaagatcgccggcaccttgcccaggccgaacaacatcagcaccgggatcaggtacacgaagctgggcatggtctgcatgatgtccagcagcggcatcagcaccgcgcgcaggcggttgctgcgcgcggcgaggatgcccagggggatgccgatcagcaccgagatgaaggtcgccaccagcatcagcgcgagggtctgcatcagcttgtcccagaggccgacggcgccgaccaggaacagcaggccggtgatcaccagggtcggcagcaggcgccgggtggcgtgccaggcgatcgccgcgacgatcgccagcaacagccaccagggcgtggcgcggagcagcccttcgaggttgacgatggcccacagcagggtgtcggagatcttgcggaacaggtcgccgtagttggtcaccagggcgtcgacccaagcgttgacccagtcggcgatggaaaatgtcaggcgttcgggaaacatggtctgctctcgtcggtcgtgggttcagagtgccgcttcgatcttcttcgccgcgtcctcgtcgacccaggcgtgccagacctcggggtgctccttgaggaactcgcgcgccaggcgcgccgcatcgatccggtccttggccatccgcgccaggtcgctgttcagcagctccgccggcaggttgaccttctccagcaccgccaccagctccggcgcctggtcgtggaaggtccgcgacaggccgacctggatcctgatgcgcttgtcgacgccgggcctttcctccaggcgcaccaggtcggcgcggcccatcagcggcgtcggcgaccagtagtagaacaggataggctcgccgcgccgatagctcgacagcaccgccgcgtccagtgccgggccggtgcccggacggaaattggtgaacgtctcttccaggccgtagcttttcagcatctcgctgttctccagctcgcaggtccagccggccgggcaattgtagaagcgccccttgcccggctcttccgggtcgcggaagacctcggcgtactgcgccaggtcggcgatagagcgcagcttcggcgccttcgcctcgagcttgcgctgcgggtcgccctcgatcacgtagcgcggcacgtaccagccctccaccgcgccgacgatgggttcgccgacgccgaccaccttgccggccgcggcggccttgttccaggcgtcgctgcggccgatccactcctcggcgaagacctggatgtcattggtgctcagcgcctgctccatggtgatcgagttgcccggcaggctatcggtggtacagccgtagcccttggccaggacgaactgcatcagctcggtgagcagggtcccgctctcccagttcagcccggcgaacttcaccgccttgccggactcgcaccagccttccgcctgggcgcccgccgcggcggcgagcaggccgagggcacagagaacactcaacatcgacttcttgtatcgcatggttcgacgctccagatgcacgattgggaaaggcagttggaaaacctgcgggccgcgcccgggggaacggcctcgatcgttgttattggctggcggctcaggccgccgtcggttccgtcacagccctccctgggcctgaagcacgccatgcgcggcatcgcccttcggcctgacccagcgccggtaggcgatcaccagcaaggcgatccagatagccccgacccacagggccgggcgggtgtccgggaaatagccgagcaccacgaagatgaacagcatgaagacgatcgccgccgccggcgcgaatggccacagcggcaccgggaacttcagcgcggcgacctggcgtggccccatgcgccggcgcatgccgacctgggccaggaggatcatcagccagacccacacggtggcgaaggtggcgatggacgcgatcaacaggaatacgctctgcgggatcaggtagttcagcgccacgccgagcagcagggccaccgccatcagcagcacggtcatccacggcacgccgtgccgcgacacccgcgagaagccgaccggcgcctggccctggcgggccatgccgtagagcatgcgaccggcgccgaagatgtcgctgttgatcgccgagatcgccgcggtgatcaccacgacattgaggatcgccgcggccgactcgatccccaggccgtcgaagatctgcacgaagggactgccgttgctgccgatctgctgccaggggaagatcgccatcagcacgaacagggtcagcacgtagaacagcaggatgcgcagcggcaccgcattgatcgcccgcgggatcacccgctgcgggtcctgcgcctcgccggcggtgatgccgatgatctcgatgccgccgaaggcgaataccaccaccgacagcgaggcgaccagcccggcccagccgttgggcaggaagccgccgtgctgccacaggttgtgcacgccggtggcggacgtcaccgcgccgcccaggctgaagccgaagaacatgatgccgagcccggcgagaatcatcgcgacgatggcaccgaccttgaccagcgacagccagaactccagctcgccgaagaccttgacatgacagaggttcagcccgccgatgaacagcacgatggacagtacccagatccagcgcggcacgtcgggaaaccagaaccccatgtagatgccgaacgcggtgacatcggcgaggcagacgatgatcatctcgaaagcgtaggtccagccggtgacgaacccggccagggggccgagatagctgctggcgtaatggccgaacgagccggacaccggctcgtgcaccgccatctcgccgagcgcgcgcatcaccatgtacaccgccgcgccggcgatcaggtaggccagcagcaccgccggcccggccatctggatggccgatgcggaaccgtagaacaggccggtgccgatcgccgaccccagtgccatgaaacgaatatgacgggcgttcagtccgcgccgaagccccgtgtcgtgcgtcatccctcggctctcctgttgttgttcttgctggagcgccccggccgagcggccgggggcgggtatcaaagactcggcaacagccgggccggcagcagcgcgttcaggcaaccgctggcgagcaactggctggctgcctcgatgtcaggggcgaagaagcgatcctcctggtagtacggcaccttgtcgcgcagcaggcggcgagcctgctccagcttcggagaactcttcaggccctcgcggaagtccaggccctggcaggcacccagccactccacggcgagaatcccgcggacgttctcggccatcgcccagagccgtttgccggcgttcggcgccatcgacacatggtcttcctggttggccgaggtcggcaggctgtcgacgctggccgggtgggccagggccttgttgtcgctggccagcgcggcggcggtgacctgggcgatcatgaagccggagttgaccccgccgttggccaccaggaacggcggcaactgcgacatgtgcatgtccatcatcagcgagatgcgccgttccgacagcgaaccgatctcggccaacgccagggccaggttgtcggcggccatcgccaccggttcggcgtggaagttgccgccggagatcacgtcgccctcggcggcgaataccagcgggttgtcggacaccgcgttggcttcgatctccagcacctcggcggcctggcgcatctgggtcaggcaggcgcccatcacctgcggctggcaacgcagcgaataggggtcctggaccttgtcgcacttctcatgggaacgcgccacctcgctgctggcggtgagcaggtcgcgataggccgcggccacgtcgatctgcccgcgctggccgcgcgcggcatggatgcgcgcatcgaacggcgcccgcgaaccgagcatggcctcgacgctgagcccgccgcagacggtggcggcggcgaacaggtcctcggcctcgaacaacccgcgcagcgcgtaggcggtggacacctgggtgccattgagcagggccaggccttccttcgccgccagggtcagcggctccagcccggccaccgccagcgcttcggcggccggcagccactcaccgcgatggcgcgcccggctttcgccgatcagcaccagcgacatgtgcgccagcggcgccaggtcgccggacgcacccaccgagcctttcagcgggatgtgcggatagacctcggcgttgatcagcgcgatcagcgcgtcgatcaccttgcggcggatgccggagaacccgcgcgccaggctgttcaccttgagcagcatgaccagccgcaccatggcgtcgtccagcgcctcgccgacgccggcggcatgggacaggacgatggaacgctggagcttctccaggtcggccggggaaatccgcgtcgaggccagcaggccgaagccggtgttgatgccgtaggcggtgcggccctcggcgatgatgttctcgacacaggcgacgctggcggcgatcggcgcgtcggcgctgggatccaggctcaggcgcacgggggccaggtaggcttggcgcaggtcggccagggtcaactggccgggtttcagatgcaggctcatcgaaggctccttgttcggttcggcgggctcggcagcgccgtccgccggcggcgtttcatgggattgaaggcggccgcgccgccctggaaattcgtctcaggccccgtgcgcgggatgttcgaaggcgccgggatcggccggcaggatcattcgcgccggggcctggcgcgtggccttgcgccgcgccaccaggtagtagaggaccgccggcaccagcaagccgatgatccaggagatatccacgccgccgaggtgctcgaccatcggtccggtgtacagcgtggtcgccaggaacggcatctgcaccagcacgccgagggtatagacggcgattcccggcaggttccagcgaccgtagcggccgtcggggtcggccagcgcgggcacgtcatagcgctcgcgggtgatgaagtagtagtcgaccaggttcaccgcgctccacggggtgaagaaggtcagcaggaacaggatgaaggacttgaacgcagcgaggaacgagtgctggccgagcagcgcgatgagcgtcgaggcgccgacgatcgcgaggacgaagaacaggcgttgcacgcgggtgatctccagttggccgcgtacgctgctgatgatggtcgcgatgcacatgaagctgccgtaggagttcagcgtggaaatggtcaccttgccgaaggcgatgctgaagtagagcagcgcggcgacggtcccgctgctgcccaggccgacgatgtaggccacctcgcggccggcgaactggccgttggccagggctgcggagaacaccccgaggaccatcgaggcctgggcgccgagcaccgagccgaggccgacggcgaggaaggtcttccacgacgaggtggacgccggcaggtagcgtgaatagtcggccacgtaggggccgaaggcgatctgccaggacgccgccagcgacaccgcgaggaggaacgaggcccagctgaagtggcggatggcgagcagatcgccgatgtcgctgagcagcatcaggcggctgaacaggtagacgaaggcgatgatgccgaggacgctggcgatccgcccgatgatgtggatgacgcgatagccgagcaccgtcaccaggacgatgaaggcggcgaagatgaagatcccggcgctgtcgctgagcccggtgagctggccgatggcctggccggaaagcaccgtgccggtggcggtgaagcccaggtacatcaggcacaccagggcgatcgggatgcaggcgccgtagacgccgaactgcacccggctggaaatcatctgcggcagccccaggcgcggcccctgcgcggcgtgcagggccatcaccgcaccgccgaggagctggccgatgagcaggccgaccagcgaccagaacacgtcgccgccgaggaccacggcgagggcgccggtgacgatggcggtgatttgtagattagcccccagccagagggtgaactggctgtagaggcgaccgtgacgctcgttcgccgggatgtagtcgatcgagcgccgttcgatcagtggcttgctgtcgctgccctgggtcatgctgctgtactccgctgcggctcgcgcgccgccattcttgttgtggcctggtcgggacagtgggcggccgcccccacgccccgccggcgtggaggcggtttccgaggtcagcgctgggcggtgatcatcggcaggttcaggccctgctccttcgcgcaatcgatggcgacctggtagccggcgtcggcgtgccgcatcaccccggtccccgggtcgttggtcagcacgcgggcgatgcgttcggcggcctcgtcgctaccgtcgcagacgatcaccatcccggagtgctgggagaagcccatgcccacgccgccgccgtggtgcagcgagacccaggtggcgccgctggcggtattcagcagggcgttcagcagcggccagtcggacaccgcgtcggagccgtcctgcatggcctcggtctcgcggttggggctggccaccgagccggagtcgaggtggtcgcggccgatgacgatcggcgcggacagctcgccgctgcgcaccatctcgttgaaggccaggccgagcttggcgcgcagccccaggccaacccagcagatgcgcgccggcaggccctggaagctgatgcgctcgcgggccatgtccagccaacggtgcaggtgggcatcgtcggggatcagttgcttgaccttggcgtcggtcttgtagatgtcctgcgggtcgcccgacagcgcggcccagcggaacggaccgatgccgcgacagaacagcgggcggatgtaggccgggacgaagccggggaaatcgaaggcattggccaccccctcttccttggccatctggcggatgttgttgccatagtcgaaggtcggcacgccctgctgctggagcgccagcatggcccgcacgtgtaccgccatggactgcttggcggccttgaccacggcggccgggtcggtctgcgcgcggtcgcggtactcttcccagctccagccggccggcaggtagccgttgagcggatcgtgggcgctggtctggtcggtgaccatgtccgggcgtacgccgcggcgaaccagttccggaaggatctcggcggcattgcccagcagggcgatggagatggccttgccttcggcggtgtagcgctggatccgcgccagggcgtcgtccaggtccttggcctgctcgtcgacgtagcgactgcgcaggcggaagtcgatgcggctctgctggcactcgatgttcagcgaacaggcgccggccagggtcgccgccagcggctgggcgccgcccatgccgccaaggccggcggtaagcacccagcggcccttgaggttgccgtcgtaatgctggcggccagcctcgacgaaggtttcgtaggtgccctggacgatgccctggctgccgatgtagatccacgaaccggcggtcatctggccatacatcgccaggcccttggcgtccagttcgttgaagtgttcccaggtcgcccagtgcggcaccaggttggagttggcgatcagcacccgcggcgcgttggcgtgggtcttgaacacgccgaccggcttgccggactgtaccagcagggtctcgtcgtcgttcagttgcttgagggtctcgacgatcctgtcgtagcactcccagttgcgcgcggcgcggccgatgccgccgtaaaccaccagttccctggggttctccgcgacctccgggtcgaggttgttcatcagcatgcgcaacggcgcttcggtcagccagctcttggcggtcagcgtagtgccgcgcggggcgcggatttcaatatcgcggaatttgctcggggtggtcacggcaggctcctgggcgtggcgttcaacgggcggcgccccgcgagggtgcgcctgaattcggggacgaagcagaggtcgggctgggtctaccgaacacatctatgcttgtacatacaagtataagcaaaggaagggccaattctgccgtcacgccctccggcgatatctgcacacccccgtgaatctcattcaacacgttgatttttctggagttaagaattagcgaaggtagcctctcccccgggagaaggagcctgccggaacggccctggatgcacgtggtcgaagcgtgcgcgcaccggtttggggccttcggtaacaccgttcagcgcaattgcgggtaaccccagccctgcgcctgacgctcgtagtcgaggagaatccggtaatgctcctcgccggccgggaggaagcttttcagcgccagtgtcgcggccaggtgcgggcactcgatcagcgtcaggttcagcgcttcgaacagctcgcggcgttgcgccgcactccagtgcagcgaggtgatcagcggcaaggccgggctcggcgcgctgcgcccgagcacgcgcaggccgtccaggcgctccggtgcgtggcgttgcaggtagccgaaggtcactgcatccaccgaggtcagctcgacctcacccgcggccaccatcgccaggctgcgcaggtggccgccgctgatgtgcacctcggcgaagaacgccgagtctcgccccagcggcgccagcgcatggcgcagcaggttcatgccgctgttggagtcgtggtcgttgagcgccaggcgggtattgcggaagtcgccgaggcgctggcgcgcctgtccttcggcggcgacgaacaggctgcaatgctcgccgggagcacaatcgggcaagtcgtagctgggcaccgcgagcaccgccacctggccgcgcaactgggtcatcagcggatagccgcaggtctgcgcgaacaacaggttaggctgtcgccactgcaccgccagatcggtggcggccgacgcgtaacggcgcacgcccaggcgccggcagacctcgccgatgaaggttgcgccggcctgcctgacgcagtccggctcgacatacatgtccagcgccgccaccaccggggtatcgatcatgctctcgtccgcctgccttcaatgctcgggatgcaccggcgcatccactggccgccaaccgtggcgccgccatagacgaccatagccgggcaggtggaaatcgccactgcgtcgccggtaggcacggcggcttgcgctatacacgcgcggcagcaggtaccagggcaggcccggcagatcgtggtggaccagatgcaagttgttgttgaggaacagcagccgccacggccaccccgcgtcgaccagcacgctgcgctgcgccggctcgcgggccggacggtgctcgtagaaagagcgcagcatgctcaggccgagggccggataggccaccgccggcaggtacaaccagggcgggatgcccgcccagcgccaaagcccggccagcaacccgcccagcagcacggcatgcaggccccacaggcgccaggcggcgccctctccctggcgcaaccgcgaaccctccaggcgcgccatcgccgccagggccagcagcgggccgagggtggcgcgaccgagcagggtcttgtccaggcagagccagcgccgccgccaggagcccaggcgcggccattcggacagactgacgtagcgactctcggggtccagccccgggtaggtcagttgctcgtcgaggtggtgccgcaagtggctgtcacggtacagcggatagggataccagacggccagcggcaggtagccgagcacggcgttgaacctcggccagcgggtcgggtggccatggatcagctcatgctgcaacgacatgtagagggaggcgaacggcaccagccccgccagcaccggccagccccaatgccgatactggctggcgagcagtgcccaaccgccgtacaggcaggcgatcagcagccaggtcggccattcgctgcgcgcctggaaggtatcctggagccgccgcaccagggtgcgctgacgcccgctcaggtagtgcgccatgaaggctggcgaggcttacttcagggaggtatcgaggcgcgcggcgacttcggccggcacccagtggctccagatttcgcgatgctggcgaaggaactgcgcacgcacctcgccgacctcgcgatgattctgcgccatgtcggcgagcagctcgttgaacagcggcaaggggatctcgaccttgcggaacagctcgaccaacgccggcgccttgtcatggaaatcgcgggaaacgccaatggtgatcttcgccggcaacgagcgggaaccgatggggtcggggttcttcggatcggacagggtggcccaggccttctcgctgaacggcggctcttccagttgcaccagcttgaaacggcccatcaacggagtcggcgaccaatagtagaaaagcaccggctcaccgcgccggaaggccgcactgatcgccgcatccagcgccgggccggtgccggtgcggaagttcgtgtagctgtcctgcaacctgtaggccttgagcttctggctgttgacgatctcgcaggtccaaccggtcgggcagttgtagaaacgccccttggcgggctcctcgggatcgcggaacagcgccttgtagcgcggcaggtcggcgaccgacctcaactccggcgccttcgcctcgatgcctcgttgcgggtcgcccttgaccaggtactccggcacccaccagccctcggtggcgcccttcaccgtctcgccgacggagaacacctcgcccgcctcctccgccgcgcgccacaccgggctacgcccggcccattgctccccggtgacctggatatcgttctggcgcagggcgttttccatggtcacggtattgcccggcagcgcgtcggtctcgcagccgtagcctttttccagtacgtagcgcaacaggtcggtggtgaacatgccgctttcccagttcagcccggcgaacaccactttgcccgggtacgggcattccgccgcgacggcggtctggctggcgaggctggcgcccagggcgaggacggcgaggatctggcgaagcgggggcatgcgggtctcccggttggagtcggacggcatgcggaactatataggcattaaaaatattggattaataacgtttgattctttggatagacaaaagcgcctaccctttcggtgtagacgctttttcctggcggcgccggcgaatcacagcgaatcgagttccaccgcacagacccacgccggctcgtgggccgtcaggcgccaatgctgcaagccctgcagcccctcggcgcacaggcagtcgtgggcagccagttgcccgcgaggttgcccttgcaaggaaatcgctaccccgtcctgctgggcgaacagcagcagcgtgctcgccgtgccgtgccagtccagctcgccctcgacccgcagccattgcaggcgcgcgcgatggcgccggggcgcatagatcaggttgaagtcgcggatagctccatcgagcagggtgcagtgcacctcgctgtcgccggaaaaggcgaaggcctgccgggcgcgtagcggcgcggattccgcgccatccacccgcaggcgcatgccgccgccctccagcacgccgatgatccgctggtaaccggcgaagcgggagaagccgccggactcgccgacatcggcgatcgacaggcgccagccgaagccgtccaggccgtcgccgccgtcgcgggcgatctcctcggtggagccggcgccgttcttccacggcattctcgggtagtcgacggcacgcaggatgcggagttcgctcatgagctgaaacgtccttccagacggtggcgggaacccgggtgcagcagccgcgcggcggtcaccgcgacacgcccggaccaggtgcggcggcggatcagcaggcacggctcgccgcgttcgatctgcaacagcttgcactcggccggctcggcgaggatcgcctcgaccacatgctcgccctcggtgagcggcgccacctgggtcaggtaggcatagggcgtttgccgggtgaaatcctgcttgaggtagtccggcgccaccgcggcgttcacgtagcggtcctcgatctgcaccgggatatcgttctcgtagtgcacgatcagcgagtggaacacccgctggccttcgcgcacgtccagtgccagggcgcgctcggggccggcgacctcctcgccgagggtgatcacctggcaacgatggcgatgcccgcgggccgcgatctcgtcggcgatgttgtgcacctcgaacagcgccgactggcccttgggctcggcgacgaaggttcctaccccctgcatgcgcaccagcaggccgtcgctggtcagttcgcgcagggcgcgattgatggtcatgcgactgaagccgagctggctgaccagttcgctctcggacggcacccggtggtgcggcggccaggcgcccgactggatctggctgacgatcatctgcttgacccgcgcgtagagcggcgccggtacctcgccgagttgcgaggccagcggggaacgatcggaggaagaggacgtcacggagagactccttgtcgaggcgtcgatgaagtgagtttacgcaccgcttaatcatctgtatatgtatatacaaataaaacagactgcgtgtgagctgattatgtccgcaattttcgctgaacgtgcgttgctgccggaaggctgggcgcgaaatgtccgtttcgagatttccgcggacggagtcctcgccgggattcgtcccgacgccaacgccgacggcgccgaacgcctcggcggcgccgtgctgccggggatgcccaacctccattcgcacgcgttccagcgcgccatggccgggctcgccgaagtcgccggcaatcccaacgacagtttctggacctggcgcgagctgatgtaccggatggtcgctcgactgtcgccggaacagatcgaggtcatcgcccgccagctctacatcgagatgctcaaggccggctacaccgcggtggcggaattccactacgtccatcacgacctcgacggccgctcctacgccgaccccgccgaactttccctgcgcatctcccgcgccgccagcgccgcaggtatcggcctgaccctgctgcccgtgctttacagtcacgcaggcttcggcggccagccggccagcgagggccagcggcgcttcatcaatggcagcgaggcctacctggaactgctccagcgcctgcgcgcgccgctggaggcggcaggccactccctgggcctgtgcttccactccctgcgcgcggtgactccgcagcagatcgccacggtcctcgccgccggccacgacgacctgccggtccacatccatatcgccgaacagcagaaggaagtcgacgactgccaggcctggagcggacgccggccgttgcaatggctgtacgagaacgtcgcggtcgaccagcgctggtgcctggtccatgcgacccacgccgaccccgccgaggtggcggcgatggcgcgtagcggcgcggtggccggcctgtgcctgagcaccgaggccaacctcggcgacggcatcttcccggcgacggacttcctcgcccagggcgggcgcctgggcatcggctcggacagccacgtctcgctcagcgtggtcgaggaactccgctggctggaatacggccagcgcctgcgtgaccggaaacgcaaccggctgtaccgcgacgaccagccgatgatcggccgcacgctctacgacgctgctctggctggcggcgcccaggcccttgggcagccgatcggtagtctcgccgtgggccgtcgcgccgacctgctggtgctcgacggcaacgacccctacctggccagcgccgagggcgacgccctgctcaaccgctggctgttcgccggcggcgaccgccaggtgcgcgacgtgatggtggccggcagatgggtggtgcgcgacggccggcatgcaggggaagagcgcagcgcacgggcattcgtccaggtgctgggggaactgctcgactgaccctgcacagcggcggacaaccgcgttgcgcttatccgccccactcgttcgagccgtcgggcgctaaacgccgatacttcccacgccagccgccaggcgtgaacggcgctggaaagaaaaaacgccccggcggggcgttccttcactggctccgcttcaactggccgtcgggtacccgccagatcagctcgtccaccgcgtaaccgcggctgcgcgcttcttccagcagacgttcgcgggtctgctgcgaaacctgcggggtacgcgacagcagccacaggtattcacggttcggattgcccaccagcgcggtacggtagtcgtcgtccaccgccagcacccaatagtcgccgcgcgccacgttggggaagagattggcgaaccagttgtcgaagcgcacccacaacttgtcggtgcggcccggctgctgggcgaccgcccgcccctccacctgctcccagtcgccatccagggtcaggcagcgattgatcacctggatgctctggtcttcctgcaagcggtaatgcgcctccgattgcgcgcagttgcgctggaagaacatcggcaagcgcgccagttcgtaccaggtgccctggtagcgctggaggtcgacctgctcggtggccggcggattcttcggcgagcccgcgcaaccgaccagcagcaagcccagccacagggtgcagagcacccggatcggcagaccgatcacttgagcccctggccggagaagagcagcgccttgtcggccgcgtactgcacgctgatgaaagccttctcgtcgccccaggtgcaactggacatgcccagcgcgccggagcactcggtgggcttgccgaggatcgcctcgacctcggccttgctcatgccggccttgagcttggaatagttttcctggttgatcttgctgcaggcggccaggacgacgcagaaagcgaccacggccagggtacggaacgacgccatgaggaactccttgttcgggggaagcgctgccctacagcttggcacacgcgggggaaatccggagccttggagtcagaaacgcgaaccgggttccctgaggaacgccgtctcctcctcgctggaggggcggccgagaatggcgttgcgatggggaaagcgaccgaagcgggcgactaccgcatgatgccgctcggcatagtcgtagaaatcgtcgaagggcttgcgcacgctgccaccgacctgatcgcgcaggtcgcggaagcaggctaccgcccgctcctggctgggcaggtcctcggcgtgctccaggaccaggtaggcgaacacccggcgcaccggcggcaactggcggtcgaagcctttttccaggccctcgcgcaccacccgttgcgcccgggcgtcgccggcgtaggcgcgcggcgtgtcgcggtagatcatccgcggcaactggtcgagcaacaggatcagcgccagccagccatcggcctcggccgtccactcctgcaagccgccgtccagcgcctggttcaccaggtcgccgaaacggccgccggcatcggcgtcctggcagacgttcttgccgaaccacaggccgttgcgctgggcaaccacctcggcggcgtcgctggaggtgccgaaccaccagtcgagcaaggtctcccagggcgcgctcatcggcctactccgcgtggtagccggtgatgcgctcgacttcctgcttcgagccgaggaacaccgcgacacgctggtgcaggttctccggcttgatgtcgaggatgcgctgggtgccgttggtggcggcgccgccggcctgctcgatgatgaacgacatcgggttggcttcgtacatcaggcgcagcttgccgggcttctccggctcgcgggcgtcgcgcgggtacatgaagacgccgccacgggtcaggatgcggtggacgtcggcgaccatcgaggcgatccagcgcatgttgtagttcttgcccagcgggccttccttgccggccagcagttcttccacgtagcgtttcaccggcgcttcccagtggcgctggttggacatgttgatggcgaactcggcggtgctttccggcacgctgatgttgtcgtgggtgaggacgaagctgcccagctcgcgatccagggtgaagcccttgacgccattgccgagggtcagcatcagcatggtctgcgggccgtagatggcgtagccggcggcgacctgggtggtgcccggctggaggaaggcttcctcgcgcagggtatcgttctggttcaggtactcgttggggcagcgcagcaccgagaagatggtgccgaccgagacgttgacgtcgatgttgctggagccgtccagcgggtcgaagaccaacaggtaggcgcctttcggatagcgccccggaatctggtaggggtggtccatctcctcggaggccatgccggccaggttgccggcccattcgttggcttccagcaggatctcgttggacatcacgtccagcttcttctgcacctcgccctgcacgttctcggtgcccatgctgccgagcacgccgcccagcgcgcccttggacaccgcatggctgatttccttgcaggcacgcgccacgacctcgatgaggaagcgcaggtcggccggggtgttgtggctgcgggtctgctcgatcagatagcggctcagggtaacgcgggacatggatggctccggagagaggaaaaaacccgcgcagtttaacgcggaattggcggtcacgcttgactccgcacaaccgccggttggagatcggcggcggcggcgcggttcatttccgcggcgcgcaaccgatcgacggtcgtcagccgcgccccatctcgccgttcaggctggcctggacgatttccacccagtagccgtcgggatcgctgatgaaggccacgttcttcatgcctcggtccagcggcttgacgaagttcaccccgagcgtttcgaaacgctcgcaggccgccaccaggtcgggcaccgagaaacagatatggccgaacccgcgcgggtcctggttgccgttgtggtactggctgtcgtcgctctcgctgccccagttgtgggtcagctcgaggaccgactggcgcccgaaggtatatcgctggcgctcgtcgaccgcatcaggcacttcttcgccacgggtcatggcgaggaaatacagggagaagcggccttcctcgaaatccaggcgacgcagcaggcgcatgccgagcacccgcgagtagaagtcgagcgagcgcttcggatccttgacccgcaacatggtgtggttgaacacgtattcctgggtgatggcgtccggctccatgcagatgccgggctgtacttcggtgttgaaactcatcgggcgattccctcgaacgaaacggatcggcagtgtatggcggtcgaccgggcggcgagtaacagcggggtactactctcttgatgccggcacgcgccgttcgttccgtcggcgagaaacgcgaccggcgccgcccgggcgccggtcgccgctacctcagaagtccaggctcagcaccaggctgacgctctgctgggtatcgtcctcgcccttgcgccagttgtagccgccgcgcagcgacagctccggtgccagcttctggctgaagccgagggagacgcggttgaggtggtcctgcggggtgtagccttcgagggtgaagcgattgcccggcaggctgttgagggacatggtgaggtcctgggtgtcgtcctcgtactcgcgttcgtgggcgtactcggcgaacagctgggtatcgctgccgaacgcgtacttgccttgcaggccggcgcccaggcgcttcgagctgcgcttctggtcgtcgtagtcgagcgcgctggcgctggcgcccttctcggaatagccgtcgacctcgacccgtgcatagtcggcgctgacgaacggcgacaggtgccagggactgtcggcctgctgggcgatgtcgtagcccaggcgcgcgctgaacgcccacaggtggccgttggtgtcgcctttctcgctgcgctcgccgccgcccagggcgaacttgcgcttcaggtcgtcgtagtcgaggtagccgccggtcaacgccgcgtcggcccaccagcggttttcctggtactgcacgaaggcgctggccatgtagctgttcatccggtagtcggaatccttggcgccggcttccagcttctgccggtagaaaccggcggcgaccccagcgcgccaggcctcgtcgatgcggtagctgccgccaagggtcaggttgtagccattgccgtcgccgctggcggcgctgtcctgggagtcgaagtccaggcgctggccaccgccgccgacgaagccgcgccactggccgacgttctgccagttctcccagtccgcctgccactggctgcgcagttcgtcctggtaggcacgcagggtgccgtgggccatttccggcagcagggtcaactcccagggcgccgacagcagcgaataggtgtagtcggcgatcaggcgctggccggtgatggtcgggtgcacgctgtcattgaacagcagtttgctcgggtcgggcgtgctgccgttgatcccgtaggtcgggttcatggtacagccgttgccgctgaaacaggtgccgatcaggttctggtcggcggccaggccgaaggaagccgggttggccatgccttccttgagcagcagcgggatgttcaacggaatgacgttggcgccggcctggctcaactgggcggtcagctcggcgttgaacgtgccgctgagttggctggcgaaaggctgcaagggaccaccgaaggtagccggggtcaggcccaggtcgggcaacagccagaccacgatgtagcgcgcgccggcctgctgcagggcctgcacgctatccaccaggcgaccggcggcctgttgtgcctggacgtcgttgaggatgcgcccctggaggaagtcgttgccgccgccggtgatgtagtacaacgcgttcggatcggcacccaggccctggcgggcacggtccaccaggtagccatcgcggctgcgcaggagggtattgtcgcgctcgatcagcgagccgttggccgcggtgatcgagtcgtagatctggtcggtccggtagccgcccaccgcccagttgttgccgtcggcgatgccctgctgggcgttgaccggcgaggtcgaggcagccaggtcgcccggggcgatgccgagctgattgccgagcagcatgggcgcggtcggtccgaagatctcgccgctgccgttctggtaggtcgggccgacccggttggtgaaacgcgaggtgcttccggcggggccggcaggatcggggaactgcccggcatcgctgaggctgtcgccgaacaccaccagcgtcgaatagggcgaaggagcagcctgcggggcggtggacagcgaagccagcaggcaggccgctaccagtggcttgagcgccattctgatcattctcttactccgtgatttgtttttattgtcgggccgccgcgtcgtcggcatgcgccccggggcccgtcataaagcctcctcagccgaacagcatagcgcggaaccggctcatggcttgttcggcgaggaacgcagcaggctcattgccattattaccagcagagcgacccccagcagaagtaccgcccacaggccgatcttcttccagtcgctacccggtgccggcgccgcgaccgccatggccacctccagcggttcgcccaggctggcgctacccagggtggcgcgcttgctctcggtatagccgggaatcagtacgccgagcggcagcgccgccgactgcgcgccgggcttgccgaacgccagccggtacggcgggctgccgcgcaccaggaacaccagttcgctggccggcaggccgacactcagggacgggacctccaggcccaggccggtacctcgttggtccacctgcagacgcagctcgcgcaccgcccagcccggcagttccagctcattctgctgtacgttgcggccgtcgatcggcagccggtagagaaccccgcgtgccaggctgctccaggcggcctcccggcgcggcgaagcgttctccgtacgatcacggccggacagttccaccgggacgatggtgtgggtcagcgcctgctccagggacacccgcacccgctgcaacggcaacgccagcggcaactgccagcggtactcgccgtcccccgcctggcgcccggccagcggctcggaccagatcatcggcgccggctcggtgctccgcgtgctgccttgcaggcgggcgccttggaggtctgccgcggttgccccggccggccaggccagacgcaggtagcgggcctggcggccgggaagcttgacctcgctgacgtcgatgcgttcgccgttgaaggtcaagcgggcgatctgtccgtcaccccaggcctgccaatgctcgaggtcgtcgctggcttccacggagaagcgctggaagccctcctccgggctgctccagtccagccgcaggcgctccaggggaaacgtcaccgcgctcgcgtcgatcagccagccgcgcaaagtctcggcagccggcccggcgttttccggcagcacctcgactatggtgccgctggtgttgcgctgcacccgcaggttcggttgcgtcgcgtcggcggcggacgtgcctcgcaacgggaacagccgcacctcggcctcatgcggcgtgctggcctggcgctcgctgccggccaccagggcgtagggcaaggcctcgccttcggcatcgaagacccgcaggtcgcgcaggtcggcatgggcagccgacaactgcacgctcatcgggatgctcaggcgataccagggaccttcgccctgcagcgacagcgccacctggcggctgaaaccttcggcagactccttcgccgacagcggcagggacaggcaggcgcccagcaggagcaggccggcggttctgaacgaaaaggagcgcgtcatggctgctcggcctccgatgcgacctcggcgcgacgcggaggcaagggtgagaagtagccgacgaccagcaacaggacgccgaccccgatgaaggagatgattcgctccaggctgccactgttgcccagctcgacgaagaacagcttgaccaccacgacgccgaccagcgccgcgccgaccatccacaggtcgcgccggccgagacgggtaccggcgatggtcaggcccagcgcacagagcgtccagaccagcgacagccccgcctgcaccagcatcgacgcggccagcgcctcggcctggaacggtacgccggccaggtggtgcgcggcgcggcacaccgccagggtcagcagggcgaacagcgaggcgccggccaacgcctggcgccccaggcgcgcgctggcattgccatcgacgagcgaggccaggctggcgtcgctccaacggtagagggcgaacagcacgatcagcagccccagttccagcgggttggccagcggcaggtaaggcagcggctcggcagcgccgtcgctgagcaggttggcgctccagaaccagccgagcagcaacagcgccaccggcgcagcggcgagcagccgatactcccgcgggaagtcgcgcagcggccagggcaggctccgcccgccagccaccagcagcaggtaggcgctcgggaccaacgcccagcccagccaacgccaggcgttgtactgttcggcgagcagggcgaacaggtagcgcagctccagcgccagcacccctagcaacagccagcaaccgagcacatgggcaacgctcagggccttcgccggcagcaacggggcaaggcgtcgcagcgacagcaggtgcgtggcgaacagcagcggccaggccagccagccgaattcgccgaacggctggtaatcgaaacgccaggcactggccagggccaacagcgccaccgggaccagcgccaggcacagcagggccagttcgcgccagcgctcgcgcagcgccagcagcatccacgacgccactgtcgccgcggccaccagcagcaacgcatgctcgcgcaggccataaggcacgaagcggacggtttcgcacagcgcggtcagcgcccaccagccggctccccagagcagcagcaagtgcgacagctcggccaggccgagggtaccgatacccagcgcccgctcgcgctcgccggcgcggcgcagccgccaggcgccgaccagcgccgccagggccagcactgccggcgtccagaacccggaatgggccaggggccgcaggccttcgccgctcagcgagccgaacagcgacggcccggcgaggaggaacgccaggccgcccactacctgcaaggcgaggccgaagtagaagctcaggcgctggcgcagcaccaggctcagccagatgatcagcagcccgctaccggcccataccgcgctggcgttgcgccaaggcaggacgaacagcactgccaggttgacgaacgccagaccggccagcagcaccaggctcaagcccatgagcagccgactgtcgtccttcaccagcgggtcgcgcgccgccagcagcatgccgccgatcagcgccaggccaatcagcgaggcggtcatcaagccacgccagcccgagtcgaataccccaccctggccatcgccgccctgcaaatgcaggaggaacagcgcaccgcccagcagttgcacggcgaaggcgcagaacaggaaggtacgcgagcccaggcgcaagccggcgaacaagctcgccaggccggccacggcccaggcgatggcggtgccgtcgacggccaggcagagcggtgcgaccaggtagaggaaggccaggccggcggccgccagcaacggccggcaggcgggctcccagtcggccagcgctttcgccggcgtgcgacgcagctgccagaagctgaacagcgccgctgcaccgagcatcagcgcgcccagcggcgaaccctccagcaacgtcgtctcacccgggcgcacgccattcaggtaggccaacgccgcaccgccctgcaacagcagggcgaagagccgcgccaggcggcgttgctggtgcaggccgagccagtatatgccggcgccctcgagggcccaggcggccgaggtccagcgcgcgtccaggccgagcggaatggccagggtgccgaagaccacccccagcgccaggcagatttccaccagcaggctggtgcgtccggccgaagcatggccgcgcagcacccgcgccaggaccatgtagaagagccccagggccagggcgctgaaggccatgccgaagtcgatgtggccgatcaccgcgcattgcaggccgaaccccaccagtggcgggccgaacagcacggtggcgtcgatgtagtcggcctgtcgcgccgaccagcgcagcagttcgccgcgcccggcaggcgcctgcgcggcctccagcagcttgcggcgggcgaagagcaggccgatcccgacgtacatcaggaagaacagggccaggaacggctcggtgctggcgaacagctccggtgtataggagcgcagtccccaggcgaagccgatgccgaaggtgccgacgaagccgaccaggttgagcggccgccaggcgcggaaccaggcgatggcgaagatgccggcgttgagcagggcgaagtagctgaacagcgctacatggttgccgctgccggtggaggtcaggatcggcgcggcgaagccgccgagcgccgccaccaccgccaggcccatggcgttctgcagcacggcgaggatcgccgagcagatcgtcaccaccaccagcagggccagcgccgcgccgggagagatcagcggatgcaggcgcatggcggcgaagatggtcaggtacagcaccgcgataccggtgccttgcaggatcaggccgtaggcggcgcgccgctcgcgcaaccaccagccgacgccgagcagcgccatcgctgccagcgccaccccggcgtagcggtactccaccggcaccgccacccgttccgaggcatagcgcaggaggaaggccaggccgatgaacagcagcaccacgccgatgcgcaataccgtgttgccgccgaacagccagcccttggccgcggcgaagccacgctcgaccagcgagggttcgcgtggaggcgctggaggggcggcacggcgcggcgctggctgggcgtcaggctggaacgccggctgacgctcgatgggctggacgggctcggggggacgaggcggaggcggcgcagcctcgacagccggcagctcgatgtcccagtccagcggcggggcaacctcggcgggaggagcgggaggcgtgtctgcgagcggctggtcgataccggcggccggctcgggaacgctttcgggaaggtcctgcgcctggcgctccacgcgcagcaagcgctggtggatgacctcggtgccgcgctcgaagcgttcggcgaattcgctcatctgcttgcgcaggcgctcgttctgttgcgccaggttctgcagcgagacggcctgtcccagggccaggccggaaaggccgccgaggagggcgccgaccagcgattccccggcgaagccgccgaggatcaggcccaccagcatgaaaatccattgcatgcgtcgaatccttgatcaagaggtaccacgatccactgatacctgccctggccatcctgccagagcggaacccgccccgggagtatacagcccgcattccagagattcgacgcattccgacgcccgccccgtggcgagctacctcttcctggcgatgaactggaccacgcaggccgcgccggtgtggaaacggccctcgaccacctcgcgctcgatttcccgcgccagcagcacctcgcactccggcagctccgcctccagcgccgcgcggctcaccagcatgtcgacgtccgccgggccgccggtgccgcggccgagctgttccggccgataggcctccagcaggaagagaccgcccggtcgcagcgaacgctccagcaggcagttgagtctgccgcgcacgcgactgggcaggtgcgcgaagatcgacaccaccgcgccgaacgccgctgccggcggttcgtagtccgccaggtcgaccaccagggtgtcgatcgacacgcctttcgcctcggccagccggcgcgccttggccaggccgacggtggagccgtccacgccaagcacctccagccccagcgaagcgaggaacaccgcgttgcgcccctcgccctcggcgacgctcagcaccggcccggccagccgctgcgcatgctccttcaggaaagcgttgggttcggttccgtagacatactcttcggcggcatagcgttcgtcccacatgaggttcacctcgtctgtatttcgtcacggcccaggtgccgaaacgctagtcttccacttcaagtcgacttgaggtcaagggcatgcggcaactggacataggcgaggtcgcgcgacgatccggggtaccggcctcgaccctgcgctactacgaggaaaagggactgatcgcctccagcggccggcacggcctgcgccggctgttcgatgcaggcgtgctggagcggctggcgctgatcgggctgggccgcgccgccgggttgtcgctggacgagattgccggcatgggcgcagccgacggcgcgctgcggatcgaccgcgcggcgctggcggccaaggccgacgaactggaccggacgatccgccgcctcgccgccatgcgcgacggcctgcggcatgccgcggcctgtccggcgcgcgagcacatggactgcccgacgttccgccgcttgctgcgggccgctgccgcgggggccatcaagccacgccggaaagcgcccggcgcatagcaaaacggccggcaggccgggcacccctgccctgcctgccggccgcgaggcacgccgttgcggcgcgccggtacggcaacggtttagaccttgctgcgctcgtagcgcttgcggtcgttctcgttgagcatcttcttgcgcaggcggatcgacttcggcgtcacttccaccagctcgtcgtcggcgatgaactccagcgcctgctcgagggtgaagcggatcggcggaaccagggcgatgacttcgtccttgccggaagcgcgcatgttgtcgagcttcttgcccttggtcgggttgatcaccaggtcgttgtcacggctgttgatgccggccaactggccttcgtagatttcgtcgcccgggccgaggaacagcttgccgcggctctgcagggtctccagcgagtaggtcagggcggtgccggtggccatggagaccagtacgccgttctggcggttgctgacttcgccggccttgatcggaccgtagtggctgaaggtcgaggtcaggatgccggtgcccgaagtcagggtcaggaagttgttgcggaagccgatcaggccgcgcgccggaatggtgtactccaggcgcacgcggcccttgccgtcgggaatcatgttgctcaggtcgcccttgcgcaggcccatctgctccatcaccgagccctggtgctgctcctcgatgtcgatggtgacgttctcgtagggctcctgcttctcgccgtccttctcgatgatcaccacttccgggcggcccacggccagctcgaagccttcgcggcgcatggtctcgatcagtaccgacaggtgcagttcgccacggccggaaaccttgaacttctccgggctgtcgcccggctcgacgcgcagcgccacgttatgcagcagttccttctccaggcgctccttgatgttgcggctggtgacgaacttgccttcgcggccggcgaacggcgaatcgttgacctggaaggtcatgctcacggtcggctggtcgacggtcagcggcggcagcgcctcgacgttctgcgggtcgcacagggtatcggagatgaacagctcctccatgccgctgacgcagacgatgtcgccggcttccgcctcggccacctcgacgcgctgcaggccgtggtggcccatgatcttcaggatgcggccgttgcgcttgctgccgtcgtcgctgatggccaccaccggggtgttggacttgaccttgccgcgggtgatgcggccgataccgatcacgccgaggaagctgttgtagtccagctgcgagatctgcatctggaacggaccctcggtgtccaccaccggagccgggacgtggtcgatgatcgcctggaacagcgcgtccatgttgtcgtccatcttctcgtggtcgaggccggcgatgccgttcagggcgctggcgtagacgatcgggaagtcgagttgctcgtcggtggcgccgaggttgtcgaacaggtcgaagatctggtcgatgacccagtccggacgcgcgcccgggcggtcgatcttgttcaccaccacgatcggacgcaggccggccttgaaggctttctgggtcacgaagcgggtctgcggcatggggccgtcctgggcgtccaccaccagcagcacggagtcgaccatcgacatcacgcgctccacctcgccgccgaagtcggcgtgaccgggggtgtcgacgatgttgatgttgtagccgttccacttgatcgcggtgttcttcgccaggatggtgatgccacgctctttttcctggtcgttggagtccatcacccgctcgctttccgcttctttgcggtcgagggtgccggacagcttcagcagcttgtccaccagggtggtcttgccatggtcgacgtgggcgatgatggcgatgttgcgcagattttcgatcacaagtcttgtctcgtttaacgcccgaagcgcggcttcgcggcggtggtggggtcggacagggcggcgcccgacacgacaggcttcttcaattaagggacgggcagcaggcggacgctgccccggtccggccggcacgccgaagggcgggcatcggcctaggcggcggacgtgtcgggaggacggtggcggatgctgccgccgaacaagcccggctgcttaagccggacgataaacacgcacattggtgtgcccctcgttgagcaggtgatgggcatgcaggcggctcatcacccctttgtcgcaatacaggaggtactggcggttggcgtccagttccttgaagcggctgttgatcgcgtagaacggcagcgcctggacttcgacgccttccagggccaggggttcgtcttcctgggcatcaggatggcggatatcgatgacaatctgaccgggcagcacctcgccgacctcttccacctgcaggtcctggccgagttcgtcgatcacccggtcgacggtgcgctgggtggcgcgctccagggcgcgctcgagcaccgccatgtcgaatttcgactcttcgtgctcgacgcggtagggcttggcctgggtggtcgggttcaccgagatcaccccgcagtattccggcatgtgccgggcgaactcggcggtgccgatctgccgggcggtgtcgatgatgtcctgcttgtggctgacgatcagcgggcgcagcaccagggtgtcggtaacccggtcgatcaccgagaggttcggcagggtctggctggacacctgggagatcgcctcgccggtcaccagcgcgtccagctccaggcgctcggccacgcggctggcggcgcgcagcatcatgcgcttgagggtcacgcccatatagctgtcgtcgaccttggtgaggatctcgccgaccacttcctcgaacggcacgctgacgaacagcacgcgctgcgagcggccgtacttctcccacaggtagtgggcgacttccatcacccccagttcgtgggcgcgcccgccgaggttgaagaacacgaagtggctgatcatcccgcggcgcatcatctggtaggccgccacggtcgagtcgaagccgccggacatcagcaccagcacctgctccagcgcgcccagcggatagccgcccaggcccggatgctggcgatggatgacgaacaggcggtcgaggcggatttccatccgcacctcgacttccggctgcttcaggtcgatcccggcagccccgcattcgcggcgcaggccgctgccgacgtaacgctccacctccatcgaggtgaacgcgtgcttgccggcgcgcttgcagcgcacggcgaaggtcttgccggccaactggtcgccgaaatgcgccttgcacttggcgaggatgtcgtcgaaatcgcccagcggatactcgtgaacctcgaggaaatgaccgatgcccggggtgcaggtcaggcgctcgatcatctcgcgcctggccttggcgtcgaccacggcggtctctacctccaggttgtcccactcgccctcgaccttcagctccgggtccaggtcgcgcagcaccgcgcggatgttcttcgccaactgccggatgaagcgcttgcgcaccggccggctcttgatggtgatttcctggaaggtcttgacgatgagtttcatgcgagggacgcgaacgcgcggggcgacggaaaaaaaggggcggaattatatctgaaattgctcacgtattgagcagaaatatgcacagttatttttgctgcaccaaaatggaatgatgcaccaacatggagcaccataacggtgcacccgaaggccgcccagctaccctgaagaagacctggccccgccaaacatggggccctgcccgattccgggcactggcacgcaacttgctcacttgtgaggcaggttgccctggcggagtattccggccggcatcacccgatactggggcacagaaaaagctcccagctctaatccctcctggaggacagcatgtcgtacaagtcgcaccaactgatcaaagaccatgacgtgaagtgggtagacctgcgcttcaccgataccaagggcaagcagcaacacgtcaccatgccggctcgcgacgcgctggacgatgagttcttcgaagccggcaagatgttcgacggctcctccatcgccggctggaaaggcatcgaagcctccgacatgatcctgatgccggacgacagcaccgccgtcctcgatccgttcaccgaagagccgaccctgatcctggtctgcgacatcatcgagccgagcaccatgcaaggctacgagcgcgacccgcgcaacatcgccaagcgcgccgaggagtacctgaagtccaccggcatcggcgacaccgtgttcgtcggcccggagccggagttcttcatcttcgacgaagtgaagttcaagtccgacatctccggctcgatgttcaagatcttctccgagcaggcttcctggaacaccgacgccgacatcgagtccggcaacaagggccatcgcccgggcgtgaagggcggctacttcccggtaccgccggtcgaccacgaccatgaaatccgcaccgccatgtgcaacgccctggaagaaatgggcctggtggtcgaagtccaccaccacgaagtggcaaccgccggccagaacgagatcggcgtgaagttcaacaccctggtcgccaaggccgacgaagtgcagaccctgaagtactgtgtgcacaacgtcgccgacgcctacggcaagaccgtgaccttcatgccgaagccgctgtacggcgacaacggttcgggcatgcacgtgcacatgtcgatctccaaggacggcaagaacaccttcgccggcgaaggctatgccggcctgtccgagaccgccctgtacttcatcggcggcatcatcaagcacggcaaggccctgaacggcttcaccaacccctcgaccaactcctacaagcgcctggtcccgggcttcgaagctccggtgatgctggcctactcggcgcgcaaccgttccgcctcgatccgtatcccctacgtatccagcccgaaggcccgccgtatcgaagcgcgcttcccggacccggcagccaacccctacctggccttcgccgcgctgctgatggccggcctggacggcatccagaacaagatccaccccggcgatgccgccgacaagaacctgtacgacctgccgccggaagaggcgaaggaaatcccgcaggtttgcggcagcctgaaagaggcgctggaagagctcgacaagggccgcgcgttcctgaccaagggcggcgtgttcaccgacgagttcatcgatgcctacatcgagctgaagagcgaagaagagatcaaggtgcgcaccttcgtgcacccgctggaatacgacctgtactacagcgtctgatccaccctttcctataacaacgagtcaccctcttgaggcctccttcgggaggccttttttatgggccggaccatggagaaacgcaaagttcgccgcgccgttcggttagacttgccgcgctccccgccccaaggataaggaccgtccatgcgtcactctctctggctcctgctcgccgccatcctcagcctgcccgcccaggccggcaccgaatgccgcgatatccacgaccgcgacctgcggcgcatgtgcaacgcactggaacgcggcgacagcggggattgcggcgacatcgacagccgcgacctgcggcgttactgcggcgcgctgctggcgccgggacagcgctacgactgcgacgacatccgcgacggcgacacgcgccgccagtgccgcgccatcgtccgcggcgaccgcaagcgctgcgacgacatcgacagccgcgacatgcgccgccagtgccgggccgtggtatcgcgtgcgccgtggcagtgcgacggcatcgacgaccgcgacatgcgccgcatctgccgggtcatcctgtcgcgctagatgccgccgtccgccggcgtgcccggctcgtccggttccgcggatttcgccttgggcgcccggctcaactgtacgttgagacgcggcatggacagttcgaggccggcctggtcgaggcgccgacgcaggcgcaggttgaacgcccgctggacctcccactgcttgatcggcgcggtcttgaagcggaagcgcaggatcgcctggccgttgtcgaaactctccacgccctgcaattccatcggcgaccacaggttgcggtagaccgccgggtcgctgcgcagctccatcgcgacctcgcgcaccagcgccaccgcgtcgtcgatcggcatgctcgccggcaccggccagcggaacatcgcgtagccgaactggcgcgagtagttcttgatgctcttgatctcgctgaacgggatggtatgcaccacgccgtccaggtcgcgcaggcgcacggtacggatggtcaggccctcgaccgtgccaaggtggccgccgacgtcgacgtagtcgtcgatcgacagcgagtcctcgatgatgatgaacaggccggtgatcaggtccgccaccagcgactgcgcgccgaagccgatggccaggccgatcacgccggcaccggccagcaacggggtgacgttcatgcccatgttggccagggcgacgatcagggcgatcaccgcgatggtggcgaacagtacgttgcggatcagcggcagcatggtcagcgcgcgggtgttcggccggctcttgccgcccaggccgaggctgtgctggatcgcggtatcggtgaggatccagatcagccaggcgaccagcagggtggtgccgaagctgactaccttcatgctgatctgctcgccctcgccttccgcatagcgaatcagcgacatgccccagacgcgcaaggcgacctcgatgaagaacagcaccacgaagatgtgcagcagggtgtagccgaagctttgcaactgctcgatgtacggcgcgctgcggcgcgggccggcgccgacccgactggaacggcggcggatcagcccgatcacggtcatcgccaccaccgccagcaccgcgcagaccagcgcccggcgcaacgccgaactgctgtcgccggcggaaacgaaggtggcgaatagggaaatccccaccagcaccagcaccggcacgaaccacagcgagccgaccagttgcaccaggtcgtgcaggctacggcgcttgaggcggcgctccagcggctggttgcggatcaggtgggcgatcggccggcggaaacgcatcacgaacagcgcggtgaacagcgcggcgctggcgttggccagggtactcaggcagatcgaggtgtgctcgccgaggccggcgatcagccgcggatcgtgggcgacctcgcccagcgcggcgaggctgccgatcagccacaacgggcggaacgcctggcgccgcaggatatccagggcgcgctggcggtgcgggccgctgagcagcgagagggaaatcacgcacagcgcggagaacagcgtgccgcagaccagcacataggccatgaccatcgccagggtcttgctcagggagtccggcagcaccaccgacaggtacagggtgatgaggaaggccaccagccaggggcccagcttgcgcagggaaaacagcagcaggtcgcgggtcttcggatgctgcggcaactccgccgacaggccgaagcgctcgcgcatgcgccggctgagccagagcagcgcgctggccaggcaggcccagaggaggatcaccaccgaaaaatcgaagaccatcgccggcaggtcgcgccagctgggaaagcgctcctcgagttcggcacgcgccagctggaactggttgccccataacgcgaccgggctgttcgcgccctggaactgcttttccaggctggtcagggtatcgccgatcagccccagcaccccaccctcgctttccttgcctttcttggtcacgtcgcgcagctgtttcagctttttcagcaggtcggcgcgctgcctgtcgttctccagggtctggatgacctggttcagcgattgttccaactgcgcatcgctgaccttctcgccaccggaggaactccccgccaacgggttcggcagcgccgcggcacccggcggcgagtagaacagggcggcgcagaggcacagcagcagggccgccaggacgcgggagcgaagggtgaagcgggcgatgatcggcacgagaaaggcagtccccaaggtgagaaaccgaaacagccgcatcatacaagccggacacccgccgtttcgaacggggccgccggccggcggcgcaagcacagacactctggcgcaacgagggttcgcccgccagtgccggctgagacgaacgcagccgcgcggcggggcacagcgaccgccaacgtgccccagcgcacaccttcgaatacccgcatgccgcacaatgcacggcttgccagcgcgccgatgcggtgcaacgcttggcaggttcacccggagaccgtccatgcgcctgatcaccagctgcctgctcctggccgccgccctgccggccatggcgcagatctaccaatacaccgacgccaacggcaacaaggtattcaccaaccagccgccagacggggtgcaggcgcagaccgtcgaactgcagccgaccaataccgtaggaatcgacacgccggaaaagtcctccgcgggcaatgccccggccgccgatagcgaggctgccgcctacgagatccttgccctcagcgacctccccacggaagaggcgctgcgcgccaacaacggcaccttcaacgtcagcgtcagcatccgcccggccctgcacagcggccaccagttgcaactggtgctggacggcaaaccctacggcacgcccagcggcggcacccgcttcaccctgcacgagatcgaccgcggcgaccacagcctcgcggtacaggtactcaacggcgaacgggtgctgcaatccagcccgccggtgaccttcaccgtgcagcgcgtgcacctcgggaagaagcgatgatcccgcgcattctcggcgccctcctgctgtgcctggcctgcgccgcgcaagcgggggtctacacctacatcgacgccgagggcaaccgcgtctacaccgaccagccccccagcgggcgcaaggcccaacgcgtcgaactggcgccgggcaacagcgtggcgccgccgggcatacgctatcgtccgcccgccgcgccgctggaggtgaagccgccggcctaccagctactgcgcatcctcttccccgaaccggacgcaaccctgcgcgccaacagcggcgacgtcatcgtcaccgtcaccagcgagccggcgctgctgcccggccatcgctatcgcctgctgctcgacggcaagcctgccggagcgccgggacgcagcccggtgttcccgttgaagaacctcgatcgcggcacccaccaggtcgcagtggaaatcatcgatggcgacggcatgaccgtcgaaagcaccccgagccagcccttccacctgcatcgagtgagcatcgccggccaacccctgccggaggtcgatacgccgctggtcagcgcggtacagccgagcgagcgctagccgaacttcccctgcccactccgccgtgggcgggattttccggtttttttcccgactctcctggcgaaaacgccgccggccacgtcaacgcaccagattggtgcgattacccgcaccactttctatactgtccccatttcgggtcaccgctcgtcgccgaaaaccttcccggcgcacctctagccagcgcctcggcagaaaaaacgcgccttttcggcgcctggtttgctttttgcattttcctgcccaaccttggaacagctgcccgccatgccgaccgataccctgcaccgactgttgctcgacaacctgaccaccgcggtgatcctgctcaacggcgaactgcgcctggagtacatgaacccggcagcggagatgctcctggccgtgagcggccagcgcagccacgggcaattcatcagcgagctgttcaccgaatcgccggaagccttgaactcgctgcgccaggcggtggaacaggcgcatccgttcaccaagcgcgaagcgaccctgacctctatcaccggcgtcagcatcacggtcgactatgcggtgacgcccatcctcaaccgcaacgagacgctgctgctgctcgaggtccatccgcgcgaccggctgatgcggatcacccgcgaagaagcacagctgtccaaacaggagaccaccaagctgctggtgcgcgggctcgcccacgagatcaagaacccgctcggcggcatccgcggcgcagcgcaactactatcccgcgagctgccggaagagtcgctgaaggactacaccaacgtcatcatcgaagaagccgaccggttgcggaacctggtggaccgcatgctcggctcgaacaaactgccgaacctggcgccgaccaacatccatgaagtgctggagcgggtcagcagcctggtggaagcggagagccagggcagcatcaccctggtccgcgactacgacccgagcatccccgacctgctgctcgaccgcgagcaaatgatccaggccgtgctcaacatggtacgcaacgccatgcaggcgatcgccgggcagaacgacctgcgcctcggtcgcatcaccctgcgcagccgtaccctgcgccagttcaccatcggccacacgcgtcaccgcctggtgtgcaaggtggagatcatcgacaacggcccgggcattccggccgagctccaggaaaccatcttctaccccatggtcagcggccgtccggacggtaccggactcggcctggccatcgcccagaacatcatcagccagcaccaggggctgattgaatgcgagagccaccccggccataccgtgttcagtctgttcctgcccctggaacaaggagtgcattgaccatgagccgatcagagaccgtctggatcgtcgacgacgaccgctccatccgctgggtactggaaaaagccctgcagcaggaaggcatgaccacggtgagcttcgacagcgccgacagcgtgatcggccgcctcggccggcagcagccggacgtgatcatctccgatatccgcatgcccggcgccagcggcctcgacctgctggcgcagatccgcgaactgcatccgcgcctaccggtgatcatcatgaccgcgcattccgacctcgacagcgcggtggcctcctaccagggcggcgccttcgaatacctgcccaagccgttcgacgtcgacgaggcggtctccctggtcaagcgcgccaaccagcacgcccaggagcagcagggcctggagctgccggcgaaccaggcgcgcacgccggagatcatcggcgaggcgccggcgatgcaggaggtattccgcgccatcggccgcctcagccattccaacatcaccgtgctgatcaacggcgaatcgggtaccggcaaggagctggtcgcccatgccctgcatcgccacagcccgcgcgcagcctcgccattcatcgcgctgaacatggcggcgatccccaaggacctgatggaatccgagctgttcggccatgagaagggcgccttcaccggggccgccgcccagcgccgcggacgcttcgagcaggccgatggcggcaccctgttcctcgacgagatcggcgacatgccggccgacacccagacccgcctgctgcgcgtcctggccgacggcgagttctaccgggtcggcgggcacacgccggtgaaggtcgacgtgaggatcatcgccgccacccaccagaacctggaaagcctggtgcgcgacggcaagttccgcgaggacctgttccatcgcctgaacgtgatccgcatccacatcccgcggctggccgaccgccgcgaggacatcccggcgctggcccggcacttcctcagccgcgccgcccaggagctggcggtggaacccaagctgctgaaggcggaaaccgaggagtacctgaagaacctcggctggccgggcaacgtccgacaactggagaacacctgccgctggatcaccgtgatggcctccggccgcgaggtgcacatcgacgacctgccgccggagctgctgacccagccgcaggacagcgcgccggcggcgaactgggaacaggccctgcgccagtgggccgaccaggcgctgggccgcggccagtcgaacctgctggacagcgccgtgccggccttcgaacggatcatgatagaaaccgccctcaagcacaccgccggccgccgccgcgatgccgccgtgctgctcggctggggccgcaataccctcacccgcaagatcaaggagctggggatgaacgtcgatggagccgacgacgaaggcgacgactgaagcgccactgctcccatgagcgacccaacggggccttcgggccccgtttttcatggtccgtcgcgcgcccctgccaagcgagacgccgccccagcctcggcagagcgcccgcccggcaccgtcgatcaaaccgtggcgtagggcgaataaccgcatcgcggttatccgccggttcggcggggcagcggcccttgcccggattttgggcagcgtgcaccagcaggcgacaaatcggcatcaatcgctggcggaaaagcccgctccgtcatttttccgcaatagacttcccacaaacccctgggatgccgccaagcccttgatccacgggcttccacaggcattcatcaccagctcgcccacagacttatccacaacccttcaggaaagcgagcgcgccgccagcgtctcatgagaattggcacagcccctgcattggagcagataacgaagatttcgggggcctcggtacaggcaggctggggaatcccctcttttacacccggcggcagacgcagcatccgcgcgcaaccgccacacccgtttcggggacctcggtacaggcaggctgagaactcccctcttttatgcccggcggcagcgcagcgatccgcgcctccgccctcccgtttggggacctcggtacaggcaggctgagaattcccccttttattcccggccgtcgcgctcctgcagttcgacgaccaggcgccagccctcgccgtcctccgaccactgccagcgcccctgcaaggggcgggtcgagaccaggctcaacagcagcgcctttccctcctcgcggacgcgccagcgcaacggctggcccagccatcgcccgtctccctgctgcgccgcgccctgggcgacgatgcgcaacgtcagggcaccctccacccgtgccgccgtaaccgcagcctggcgatcgaagcgcaggaccaggccctgctcgctctccccgaccgccagcagttgcggcgcagacgtcggcagcgaagcggggccgaacaacctgccgagcatcagcccgaacaacaacccggcaagcaccagcgcaccccagactttccagcgctggcgccgcagatcgtcgatggcggaggtagaatgccgcccgttatctgctccggagccctgcatgttccacgtcatcctgtttcaaccggagatacctccgaataccggcaacattatcaggctctgcgccaacgccggatgcagtctgcacctgatcgagccgctcggtttcgaactggacgacaagcgcttgcgccgtgccggcctcgactaccacgaatacgccagcgtacgccgctacccggatctgcagagctgcctcgaggccctcggccagccacgcctgttcgccttcaccaccaaggggtcgcgggccttccacgaagtggcctaccagcgcgacgatgccttcctcttcggcccggaaagccgcggactgccggaggacgtgcgcaacgccctgccaaccgatcggcgcctgcgcctgccgatgcgcgaaggctgccgtagcctgaacctgtccaacacggtggcggtgaccgtctacgaagcctggcgccagctcggcttcgccatggactgagccggccgacaggcatgaaaaagcccgcgcaaggcgggcttcttcgcaagcgctgggcttactggaccgacggcgtcgggatctcgccggaggcctgcatgcgggcgatttcctgagcgtagagggcgtcgaagttcaccggcgacagcatcagcgccgggaacgaaccgcgtaccaccaggttgtccagggcttcgcgagcgtacgggaagaggatgttcgggcagaacgcgccaagggtatggctcatgctcgacggatcgaggttcttgatcaggaagatgccggcctgctgcacttcggcgatgaaggcagtggtgtcctcgccgttcttcacggtcaccgatacggtcaggaccacttcgtagaagtcgccgtccagctgcttctggcgagtgttcaggtccaggctgatggacgggttccattcctggcggaagatttccggtgacttcggcgactcgaacgacaggtcgcgcaggtagatgcgctgcagggagaactggggttgctgctcgtcggcagcgccgttggtagcttgctcggtcattttcgggccttcccttgggtcaattcatgaatggtttcaggcagacagcagcgcgtccagcttgccggcgcgctccagtgcatgaaggtcgtcgcagccgccgacatgggtctcgccgatccagatctgcggcacggtggtcgatcccgccttgcgtgccagctcggcgcgcagttcgggcttgccgtcgcaggcgatctcctggaagtccacgcccttgcgttgcagcaactgcttggcgcggatgcagtacggacaccaggcggtggtgtagatcacgacgggcggcatgtcacttcaccagcggcaggttgtcgccgcgccagctgccgatcccgccggacagcttggcggcgttgaagccggccttcttcaggacgccgccccaggtaccggaatgctggcccatggcgtcgaccaggatgatggtcttgcccttgtacttttccagctcggtcatgcggctgttcagcttgtcggccgggatgttcagcgcgtcgacgatgtgcccgctggcgaactccttggccggacggatatccaggaccaccgcctggtcggcattgaccagcgcggtcagctcgcgggtcgacaggctcttgccacccttgcgcagctcgtgcagcaacagcaggaccagcaggaccagcagcgccgcgaccagcaggtagtggttggtggcgaactcgatcagacgggaaacgaattgcatggtgacggatatccagggcgtaaaaatgccggccagtatacagaccgcgccggccaggggggaacccgccgggcggcgccccgctcggctccaggaaatggcgtcgcgggaaacttcacggttagaatgccggtccttttctgtgaagctggccagttccggcccgggcacggttcgggcgggacagagggagcgaggatagcggcattcggttgcggatcggcgtcatcggtttaatcaatcagcctcttcctacgtcttgaacgacaatgttcccactaaatttggtcagtttctgaaccccgcggaaatagagccggacatatgactgccacgcccaaacccctggtcctgatcatcctggacggcttcggccacagcgaaagccctgactacaacgccatctacgccgcgaagaagccggtctgggatcgcctcctggcaacccagccgcacggcctgatctccggctccggcatggacgtcggcctgcccgacggccagatgggcaattccgaggtcggccacatgaacctcggcgcaggccgcgtggtgtaccaggacttcacccgcgtcaccaaggccatccgcgacggcgaattcttcgaaaacccggtgatcgccggcgcggtcgacaaggccgtcgccgccgacaaggcggtgcacatcctcggcctgctctccccgggcggcgtacacagccatgaagaccacctggtggcgatggcgcagatggccgccaggcgcggcgccggcaagatctacctgcatgccttcctggatggccgcgataccccgccgaaaagcgcgcagccgtcgctggagcgtctcgacgccaccttcgccgggctcggcaagggccgcatcgcctcgatcatcggccgctatttcgcgatggaccgcgacaaccgctgggaccgcgtccaggccgcctatgaactgatcgtcgacggcaaggccgagttcaccgccgactcctcggtggcagccctcgaggccgcctacgcccgcggcgagagcgacgaattcgtcaaggccaccgcggtggtcccggccggcgccgaagcggtgcgggtcgaggatggcgacgcggtgatcttcatgaacttccgcgccgaccgcgcccgcgagctgagccgcgccttcgtcgagccggcattcaatgagttcccccgcgaacgagccccgcaactggcaggtttcgtcatgctgacccagtacgcggcgagcatcccggcgccctgtgccttcccgccggagccgctgaccaacgtcctcggcgaatacctggccaagcatggcaagacccagctgcgcatcgccgagaccgagaagtacgcccatgtgaccttcttcttctccggcggccgcgaggaaccctacgaaggcgaggagcgcatcctgatcccctcgccgaaggtcgccacctacgacctgcagcccgagatgagcgcgccggaagtcaccgaccgtatcgtcgaggccatcgagcaacagcgctacgacgtgatcgtggtcaactacgccaacggcgacatggtcggccacaccggcgtgttcgaggccgcggtcaaggccgtggagtgcctggacacctgcatgggccgtatcgtcgaggcgctggacaaggtcggcggcgaagccctgatcaccgccgaccacggcaatgtcgagcagatggaagacgagtccaccggccaggcgcacaccgcgcacacctgcgaaccggtgcccttcgtctacgtcggcaagcgcaagctgagcatccgcgaaggcggcgtgctggccgacgtggcgccgaccatgctgaccctcatggggctggagcagccggcggaaatgaccggtcgcagcatcgtcaccctcggctgatccgcgaacgacgaactcccgcgcagggcggataaccgcgtcgcggttatccgccgcttctgcaggccatcgacggataacgcctgcgacgttatccgccgtagcgggccgggcgccgcgccccgtttccacgacgccaccttccccgctttaacgctgccgatcggccgacaggcctggccacgcggcgtcgagacgtgtgccgcggttttcattttccgcgtctccccccctgcctcccgctacgtcgccgaggcccgtgctagccttgcccgcgctgtcttttccatctgccctacaaggatttccgccgatgtggttcctcctcgccacctcgctcctcgccctgtccttccagcgcctgctggctctcgccttgctgctcgcgacctgctgcctcgccttctacgacggagttctcgctccgcctgcggtcgccgccctggctgtactgggcgtcctcgccctgttgcgccggcgcctggcggcacgccgcgcctgggccctgggcctggagctgctgctggtcgccggcgcggtgggccttttcctgcacctgctacccggcttcgccaaccccagggtcctggacaaggcggtggtcggcccgcagagcctgccgttcaccatgtacttcaacttcgacaaggcactggtgccgttcctgctactggcctgcctgccgagcctgttccgcgacgaagcccgcgctcccggccgcccctggcactggctgctgctcgtggcggcggtgccggcgctgcttctgctggctgtcggcgtcggcctgctgcggccggaactccacgcgccggcctggctctggcagttcgtcctggccaacctgttcttcgtttcccttgccgaggaagcgctgttccgcggctacctgcagcaacgcctgggccaatggctgggcccctggcccgccctggcgctggcctcggcgctgttcggcctggcgcacttcgccggcggcccgctgctgatgctgttcgccggcctcgccgggctgatctacgggttggcctggctgtggagcggccgcctgtgggtggcgacgctgttccacttcgggctgaacctgacgcatctgctgctgttcacctacccgctctacagacccgcctgatgcccgtggccttcgtcgtcgacgacatccgccgctgccatccggctgaaatacgtggaagcgccccacagcgcgcggtgcggggcgttttttttaacggcggccacgggcatactaggccggtccaattcccaggtgcccgccaccccatgctccgcctccttcctctcctgctatccctcgcctgtctcgctccggccttcgccgacgagcgcgccgacacccaacgccagctggaacagacgcagaaggacatcggcgagctgaagaagctgctggacggcatccagcaggaaaagagcggcgtgcagaagcagctgaagtccaccgagaccgagatgggcgacctggaaaaacagatcaaggccctgcaggacgagctggacaagagcgaagccgagctgaaacggctggatggggagaaaaaaaaactccaggacgcgcgcattgagcaacagcgcctcctcgccatccaggcccgcgctgcctaccagagcggacgcgaggaatacctgaagctgctgctgaaccaggaacacccggaaaaattcagccgcaccctcacctactacgactacatcaacaaagcccgtctcgaacagctcgccagcttcaacgaaaccctccgccagttggccaacgtcgagcaggacatctctgcgcagaaagccgaacaactgagcaagcagggcgagctggacagccgccgcgaggcgctggcagcgacccgcaaggagcgccagcaagccctggccaagctgaacagcgactaccgcgaacgcgaccagaagctcaagtcccgccaacaggaccaggccgagctggccaaggtactgcggaccatcgaggaaaccctggcccgccaggcccgcgaagccgccgccgcggcggagcgcgagcgccagcgcgcgctggccgccgaacgcgagcgtgcgcgtcagcagcaggcctcccccggacgagtcaccagcccgccgcgcgaacctgcgccgggcccgctggtctcaagcactggcgcggtctacggcggcgcgttcggctcggcccgcggcaagctgccgtggccggtgaatggccgcgtcgtggcgcgcttcggcagccagcgcggcgacgatccgcgggcgaaatgggacggcgtactgatttcggcgagcgccggcagcaccgtccgcgcggtgcacggcggacgcgtggtattcgccgactggttgcgcggagccggcctgttggtcatcctcgaccacggtggcggctacctcagcctttatggccataatcaaagcctgctgaaagacgccggcgacaccgtgaaggccggcgacccgatcgccaccgttggaaccagcggcggccagagtagcccggccgtgtacttcgccattcgccatcagggccgcccggcggaccctactacctggtgccgcgcgcagggataggcgccgaactcgtgattaggagctgaacatgctgcattgcttccgtcccaccaccctggcgctggccctgctgctcggcgcgggcgcggcccaggctgccgacgccccggccgacgccgcgccactggccaacggtagcagtgccccgctgcccctcgacgaactgcgtaccttcgccgaggttctcgaccgggtgaaggccgcctatgtcgagccagtggacgacaagaccctgctggagaacgccatcaagggcatgctcagcaacctcgacccgcactccgcctacctcggcccggaggacttcgccgagctgcaggaaagcaccagcggcgagttcggcggcctgggcatcgaggtcggcagcgaagacggcttcatcaaggtggtctcgccgatcgacgacacccccgcggcccgcgccggcatccagcccggcgacctgatcgtgcagatcgacggcaagccgaccaagggccagtcgatgaccgaagcggtcgacagcatgcgcggcaaggccggctccccgatcaccctgaccatcgtccgcgatggcggcagaccgttcgacgtcgaactcaagcgcgccatcatcaaggtcaagagcgtcaagagccaggtcctcgaacccggctacgcctacctgcgcatcacccagttccaggtcaacaccggcgaggaagtggtcaaggcgctgaaccagctgcgcaaggacaacaagggccgtctcaagggcctggtcctggacctgcgcaacaaccccggcggcgtgctgcagtccgccgtcgaggtagccgacgccttcctcaccaagggcctgatcgtctacaccaagggccgcatcgccaactccgagctgcgcttcagcgccgacccggccgatcccagcgacaaggttccgctggtggtgctgatcaacggtggcagcgcctcggcggcggaaatcgttgccggtgccctgcaggaccagaagcgcgcgatcctgatgggcaccgacagcttcggcaagggctcggtgcagaccgtgctgccgctgaacaacgaccgcgccctgaagctcaccaccgcgctctactacacccccaacgggcgctccatccaggcccagggcatcgttccggacatcgaagtcggacgcgccaaggtgacccaggagcggagcagcttcgagggcttcaaggaagccgacctgcagggccacctggccaacggcaacggcggcgccgaccgccccaccggcaagcgtgccgcgccgagcgagcgcccgcaggattccgactaccagctcagccaggcccttagcctgctgaaaggcctgagcgtcacccgcggcaactgatgtcggcgttccgcgttgccctgctgggcctgtgcctgctgttcaaccaggcccaggcccgccaggaccccgtcccctaccagcgcccgccgctgctgaccgtggtcatcgatgacctcgggcagaacctggcacgcgaccgccgggttctcgacctgccccccggcgtaaccctggcgatcatcccggaaaccccgcatgccgccgaactggcccgcgaggcgcaccagcgcgggcgcacggtgatcctgcacatgccgatggacccggccggcggtccctacgcctggcggccggagctgacccaggaagagcgtgcgcggcggctggacgcggcgctggccaaggtgccgttcgtgcaaggcctgaacaaccacgagggcagccgcatgaccgcggtgcgcccggcgatggcctggctcgccgaggaactccagcgtcgcggcctgtacctggtcgacagccgcaccagcgccgccaccgtggccgccagcgaggcgcagcggatcggcctggcgagcgtctcgcgcgatgtgttcctcgacaacgaagccacaccggaagcggtctccgcacaactgcaggccggcgtcgccctggcccgcaagcagggttcggcgttgctcatcggccacccgcacaaggccaccctcgacgtgctggcgcgggagctgccgaagctgcgcgcccagggcatcgagctggtaccgccgcagatgctcatcggcgagcgcggcaaccgcaacgtcaacccacgccaggcgccgcactgaagccgggtttaccggcgtcgcggcagcggttaaggtgacgtcctcgtcattcctgcacggacgcaccgatggcccgcccttcccctcccatgcccctgctcgccgccgccctgctggtcgcaggcgcgattcccctcggtttcatctggatcctcaccagcgccaagttcgagataggcggcgccagccccggcgagagcaccgtcggcaaggtcgagaacatcgaccagcgcgccatggagcaattctgcaccggcgtgcgggcgacgcccgccggcacctggctggtaggccggcgcgaggtcggccgcgacgagcaggctctgcccgagggcgtcatcgacctggacctggtggcggccgcccagcccagggaaaaagagtccgacccccacctcttcaacttcctcaacggcatgctgctatccggcggcgatccggaaaccacctatgtctcgcgcctgggcgcggacggcgtgttccacgaagtggcgcggctcggcgagaccgcctgcctggaagtcacgccggacggttccagcgtcttcctgctcaccggcctgcggcgcccgggcaaggacaacggtcagcgcgagcagacagtggtgctgcgcagcgacgaccagggcaagagctggcggcggctcgaggaaggcttcatggccgaggcgaatcgactgggctgggctctcgcaccgcgcttccacggcaaggatgaagtctgggtctggggtgatttcgaatacggcggtgccgatggcggccgggaacccggccagccgagcgggctgttctattcgcccgaccgcggcgccagtgtcgagtcgatcgccacctccgcgccgctgctggtcgacctcgcctacgcccgcgagttggcgccgaacggcgtcaactggggcgactacaacggcaagcacgggcagatcaaggcacacgtcgcccaactgaacgcggagcgcgccgcgatctgggtaagccagaccttccgctatggcccacccgaggggcgctacctgaccagctcgatattggtcaccacccaggccgaactgcgccgcgagggcggacgctggcagatgggcgcgatccggcgcaccgacggcgtggccgtcgagcgcctggaacagaacatggacggtcgggtgatcgcagtgctcgaccacccggacgaatcgcgctcgctgatcgccgagctcgatcgcgacgcgctcgaatggaagatcaccggcaagctgcccagcccgttctggcccctgccgtccagttccgggctgcgcgagttctacatgggcaggaatgtgctgctggccaacaccatgagccactacgaagtgccgctgtggctgtatcccgacgaagagccggcgagcgtctccgccaacgcggtgtactactcggacgactggggttcatcctggcgccgcctggacatcgccggctacctcggcgtgctcggcttcgacgaggcgcacgaccgggtgttctgggcccgcggcaactggtacgacagccgcgacctcggcgtccaggcctacgacctggactgagccccctcgccgcgccggcggaggggcgcccgccagtcagaggtagttagcgacggcttcgtcgacgaagccttcctggcgcatctgctccagggccttttgcaggcgctccaccacctcgtccggagtgtccttgttcaacgccaggtagagcttggcctcgttgaaacgcagcaccgtctgcaggccggacacgccttcctgcttggccaggtagcggccgaccggatcggtggtggcccacaggtcgatctgcccgccggtaagcttcttcacgttttcctggtcgcgcagggcgttgatcaccgggatgccctgggcctccaggtgctggctgaccgcgtcgttcttgtaggcgccgagcttgtagcgggcggcgtccttgagattcttcacggcgatcttgctgccggccggcgccagcaacacccaactggtgtcggccagcgggccgacccatttgaactgcggcacccgctcgggggtgtaggtcatggagaacagcccgtagccgggcttgtccagggtcaaccggtacaggcggtcccaggggaagcgcaggctcagggaatagccgatgccggcgcgcctgaacatctcccggacgatgtcggcactgatgccgtcgatgccatcgtcgcgggcgaagttcttgtcgtccaccgccatgttgaagggcgggaagttctcggtcagcagcaccaccttgtagtcggcgggcaattcggcacgggccgcggaggcccccagcaacacccccaggatcagggtctggatcaggactttcagcatggtcacaccgctcgcttggttatcgttattggctagcggcatccctgcgtcaggacgaaatacctggctcgtcggccttccatggcattgccggcggggccggcaaaggcgtttccccgcccggccccctgttggccggacggagcgaatcagagatagctgttgaggatgtcctcgacgaagccttccttgcgcatgccgtccagggctgcctggagcttctgcaccacttcgtcgggagtctcgcggttgagcgccaggtacagctggtcgctgttgaagcgcagcaccgtcttcaggccggtcacgccttcctgcttggccaggtagcgcccggcgggatcgccgctggcccagaggtcgatctggcccttgaccagcttctgcgcgttttcctggtcgcgtagcgccaggtcggcctcgaaaccgttcttgccgaggaactcggcgatggcatcgcccttgtaggcgccgatccggtatttcttcgcctcgtccaggctgcccagggtgatcgggctgtcgcccttggccagcagcacccagtcgtccgggccgatcggaccgacccacttgaacttgtcctcgcgctcggccaggcgggcggtgacgaacaccccgtagccgggcttctccagcgccagcttgtagatgcggtcccaggggaaacgcagggtcaggctgtacttgatgccggcgcgcttgaacatctcgcggacgatatccacggcgatgccgtcgatgttgtcttcctgggcgaagttcttgccgttgatcgccatgttgtacggcgggaagttctccgtgagcaggaccatgctgtagtcgggatcggtttcggcgcgcgcgccgccgaccagcagcagggttgcgagcagcgcgaagagcaggcttctttgcattgttgtcatcctgtcaggggcctggagcgaggcagaataaccagcgccgcgccgccaggccagccttttgccagcatcgccggcgaggcgtcagtagcgctcgcggatctgcttcaacaagccttcgctgcgcagcgcgtcgaccgccgtttgcaacttctgcaccagctcgtccggggtgtccttgttcagcgccaggaacagctcggcggtatggaaacgctggaccaccttcacctccttgaggccctcgcgctgggcgacgtagcgcccgctcggatcggcggtgacccagagatcgatctgcccactggccagcttgtcgacgttctcgttgtcgcgcagcgccagttgcacctgcaggccgcggtcgaccaggtgctgactgatggcgtcgttcttgtagccgccgatccggtagcgcgcggcgtcttccaggctgttcaggtggatgctgctgtcgccgcgagccatcagtacccagtcgttgaccgccagcgggccgacccacttgaacttgtcctcgcgctccggcgtacgggcggtggaaaacacgccatagccgggctcgctcagcgcctgctggtagacccggtcccaggggaagcgcaggatcagctggcactcgatctgcgcgcgctcgcaggcggcgcgcacggtatcggtgctgatgccgctgatgccatcgtccttggcgtagttgccgccgttcaccgccatgttgaacggcaccaggttctcggtcagcaggaccagggtttcggcgcgcgccagggcgctagcgcatagcagggccaggctgccgacgcagccgagagccagacggaagatggacatggaggactccctgtcggtcgcaatgtttgtcgttatggcagggcatcggcgctctagcggcacctgatgcggggggcgtgactgtacctgaaagaaagccgcgcgagtgtcgactcgcgctcaggaatggctagccgatcaccggccctgtgcgctgcggcgcaacgcgcctcagcgcaccacgataccgcggctggccaggtaggccttggcttccggcacggtgtactcgccgaagtggaagatgctcgccgcgagcaccgcgtcggccttgccctcgaggatgccggcggccagatgctccaggttgccgacgccgccggaagcgatcaccggcacgttcaccgcctcgctgatggcgcgggtcacgcccaggtcgtaaccgctcttcacgccgtcctggtccatgctggtcaggagaatctcgccagcgcccaggtcttccatcttcttcgcccagagcacggcatccagcccggtgggcttgcgcccgccatgggtgaagatttcccagcgcggcgcctcgcccggggcggaaaccttcttcgcgtcgatggcgaccacgatgcactgcgagccgaagcggtcggcggcctcaccgacgaactcggggttgaacaccgcggcggtgttgatcgagaccttgtccgcgccggcattcaacaggttgcggatgtcctgcacgctgcgtacgccgccgcccacggtcagcggaatgaacacctggctagccatgcgctcgacggtatgcagggtggtgtcgcgcccgtcgacgctggcggtgatatcgaggaaggtgatctcgtcggcaccctgctcgtcgtagcggcgagcgatctcgaccgggtcgccggcgtcgcggatgttctcgaacttgacgcccttgaccactcggccgttgtccacgtcgaggcaggggatgatgcgttttgccagtgccatgcggttcgcctcaggccttgaagttgtcgcacagcgcctgggcttcggccacgtccagggtgccttcgtagatcgcccggccggtgatggcgccgatgatccccggggtgcgggcgtccagcagcttctggatgtcgccgagattgtggataccgccggaggcgatcaccggaatccgcgtggcattggccagcgcggcggtagcctcgacattgcagccctgcatcatgccgtccttggaaatatccgtgtagacgatggcggacaccccgtcggcctcgaagcgacgagccaggtcgatcacctggacttcgctgacctcggcccagccgtcggtggcgacgaaaccgtccttggcatccaggccgacgatgaccttgcccgggaaggcgcggcaggcctcgccgacgaactcaggctgcttgaccgccttggtgccgatgatgacgtagctgacgccggcgcgaacgtaatgctcgatggtttccagcgagcggatgccgccgccgatctggatcggcaggtccgggtagcgacgggcgatggcggtgaccacctcgccgttgaccggcttgccttcgaaagcgccgttcaggtccaccaggtgcaggcggcggcaaccgccatcgacccatttggcggccatcgccaccggatcgtcggagaagaccgtggcgtcttccatcaggccctggcgcagacgcacgcaggcgccgtctttcaagtcgatcgcgggaatgatcagcatcggtgaaccctgttcaagtctgtattcggtggacaggcgcgcggaaactcaactcttttccagcgcccagacatcgctctcgatgctttcgaaccgttccttcaggtacgactgcacgtcgaggatggccttgttgtagaagtacggggcgaactcgcgggcgaagaaatcgagcagttcctcggcttcgaaggaacccagctccagttcgaagcggtcctccatgaagcgcttgatcgccagtaccgcgtcctgagtctgcgcggcgtccagctggaggatcggcgtattgctcttcgccctggccatgacctaccagcgcccgtcccaggccacgaagttctgcagcagttgcaggccgtgggtatggctcttttccgggtggaactgcacggcgaaacgcgagccttcggccagcgcggcggcgaaatcgacgccgtagtgcccgtgccccaccacctggcgcgggttaccggcctcgatgtaatagctgtgcacgaagtagaagcgcgcctggtcgggaatctcgtgccacaacgggtgctccaccgcctggctcacctggttccagcccatgtgcggcaccttcaggtgctcgccggcttcgtgcaggtccttgccgaagaagcgcacctggccggggaacagaccgatgcagtcgaccccgtcgttctcctcgctgcgctccagcaatgcctgcatgccgacgcagatgccgaggaacgggcggtcctggctgacctcgcggaccagggcgtcgaagcccaggcggcggatctcggccatgcagtcgcggatcgcgccaaccccggggaacaccacccggtcggcctcgcggatcaccgccgcgtcgctgctaaccagcacccggccggcaccgacgtgctcaagggccttggccaccgagtgcaggttgcccatgccgtagtcgatcacggctaccgtctgcatcacaggcaccctttggtcgacggcatctgcccggccatccgctcgtccagctcgatggccatgcgcagcgcgcggccgaaggccttgaacacggtctcgatctggtggtgggtgttgtgcccgcgcaggttgtcgatgtgcagggtcacctgggcgtggttgacgaagccctggaagaattccatgaacaggtcgacgtcgaagccgccgacgctggcacgggtaaagggaacgtgcatctgcaggccgggccgcccggagaagtcgatgaccacccgcgacagcgcctcgtcgaggggcacgtaggcgtggccgtagcggcggatgcccttcttgtcgccgatggccttggcgaaggcctggccgagggtgatgccgatgtcctcgacggtgtggtgatcgtcgatatgcaggtcgcccttgcactcgatgtccaggtcgatcaggccgtggcgggcgatctggtccatcatgtggtcaaggaagggaaccccggtatcgaaccgggccttgccggtcccatccaggtcgatggagaccttgatctgggtctccagggtgtcgcgcgcgacggatgccttgcgttcggccatcaccagctccacagctaacactgcacgtaattataagagggccagcattataggcaggcccgggctggcgctgccagccgcgaccgtcggcgcgaatcgccccacgggcggcgggccaggccttacactgcgctcctttcatcccgccgcggagagccgcatgcccgtgatcgtcgaaaccctcgcccaacccagcgcccaggatcgcctggacctggcgaagatctacgccgacgcgccggactggctgttcgccccgcatgccgacggcgcggcgctggtcgcggccgggctggccgccggcgagctgatcgccgggcgcttcaacgaccgcctgctgggtgccgccctgctgcggcgcggcgacgacgcctggcagctgtcgcacctttgcgtgcgcggcatcacccgcggccgcggggtcggccgacgcctcctcgacgaggcccggcgcctggctgccgaagccggcaagccgctgcgcctggtcgccccggacgggcacctggaggcccgtgccctcgcggcacgccacgggctgccgctggacagcctctgatatgctcggtggcggtccccgccacggagcttcgccatgtccttttcctccgccgaacgcgccgccctgcttgccctcaagggggtcggcccgaccgtgctgcaacgcctggagcagatgggccttgacagcttcgtccggctgcgcgactgcgacgccgcgattatcctcgcccagggcgcggccctgaccggctccagttgctggaagaacagcccgcaggcgcgggcagcgatcgtcgccgtgctgcagcgcgcagccagcgacgcatgaacgacgtcgacgtactggtagtcggcgccggcgccctcggcctggcctgcgccgcgcgcctggccgaagccggccacggcgcactggtggcggagcgcgaacggctggtcggtagccacacctccagtcgcaattccgaagtgatccacgccggcctctactacccgcccggctcgctcaaggccgatctctgcctggaaggccgcgaacgcctgtacgcctggtgcgcccgccacggcgtcggccaccggcgcatcggcaagctgctggtggcggtggaggaaaacgagcgcgagaggctccaggccctggcggccaacgcacgcgcctgcggggtcgacgacctgatgccgctggacggcaccacgctgcgcgcgctggagccccaggtccgcggggtcgccgccctgctctcgccgagcacgggaatcatcgacagccacgcctacctgcaatcgctgcaggccgtcgccgaacgccacggcgcacaactggcgctggacacccgggtcgaccgcctggagcgccacgccggcggctggcgcgccgaaggacagagcgtcggcgaagcgttccggttgcgcgcgggctgggtggtcaatgccggcggcctgttcgcccaggcgctggcgcaacgcaccgaaggcctcgatccgcgcctggtgccggcgctgcacctgtgccaggggcgctatttctcctacagcggccgctcgccgttccgccacctggtctacccgatgcccgaggcgcgcaccgccgggctcggcatccacgccaccctcgacctcggcggccagttgcgcttcggtcccgacgtgaattacgtggacaacctcgactaccgcgtcgacgaatccctccgccccgccttcgcccaggccatctcgcgctacttccccggcatcgatcctcggcgcctggccgccggctacgccggcatccggcccaagctcggcgggccgggggaacccgccgccgacttcatcatccaaacccctgccgaacacggcctgcccggcctggtcaacctgttcggcatcgagtcgcccggcctcaccgccagcctggcgctcgccgaacgggtcgcccgcgcactctgagacgaggtttcgccgcgcgcagggtcggcctggcaaaacggcgttgttatactcgcccgcacattcaccgctgccagcacaaaggattcgtccatgaaagcattcggcaaggtcctggggctgttcttcctgggactcttactgctcgtcgtggccctgggcttcgccctgacccacctgttcgatcccaatgactacaaggacgaaatccgccagatcgcccgcgacaaggccaacctggagctggacctgaagggcgacatcggctggagcctgttcccctggctgggcctggagctgcacgacaccagcatcgccagcgccgccacgccgaccaagccgttcgccgacctgcagatgctcggcctgtcggtgcgggtcctgccgctgctgcgcaaggacgtacagatgagcgcgatccgcgtcgaaggcctgagcctggacctggtccgcgacaagcagggcaagggcaactgggaaaacatcggcaagccggcccagccccaggccccggccgctccttccgccaccccgccggcagcggacggcaagggcgcccaggcgcaggcaccggagcaggcgccgcagaacgacagcccgcgcaccccgatcaagctcgacatcgatagcctcaatgtcaacaacgcccgcgtcacctacaccgacgaagccagcggcaagcagtacaacgtcgagggcatcgagctgagcaccggcgccattcgcgaaggcagcagcattccgctgaagctcaacgcctacctcggcaccaaccagccggtggtacgggtcaagaccgagctgaccggcaacctgcgcttcgacaccgcgctcaggcgctaccaactggaagacgccaggctctccggcgaagcctcgggcgagccgctgcaaggcaagaccgccaccttctccgcccagggccagttgctgctcgaccagtcggcgcagatcgccgagtggaacggcctgaagctgagcgtcaaccagttgcgcgccctcggcgaactgaaggcccgcgagctggacaaggacaccaagttcagcggcggcctgtcgatcgcgccgatgaacctgcgcgagttcctcgccggcatcggtgtgaccctgccggccatggccgatgccaacaccctcggcaagttcgagctgaacacccgcctggccggcagccgcaacagcctgaatctcgaagacctcaagctgggtctggacgacaccgccttcagcggccgcttcggcatcgccgatttcgccaggcaatcgctgcgcgcccagctcaagggcgacaagctcgacctcgaccgctacctgccggccaaggccaagcaagcccaggatgccgccagcgccacgcgcaaggcggaagtcgacgccaccgtggccagtgccgcccagggcaacacgccgctaccggaaaaaccgaccaggcaggcctggagcgacgcgccgctgctgcccatcgcgaccctgcgcaagctcgacctggacgtggcgctgaacttcggccggctgaccgtcgagaagctgccgatcgacgacgccagcctgaagctgcgcggccagggcggcgtgatcagcctcgacgacatgcgcggcgggctgtacaacggccgcttcaacgccaaggccaacctcgatgtacgccaggacagcgccgtgctgaccgccaccaagcacatcgccaacgtgccggtggagcgcctgctcgaagcccagggcaagaaaccgccggtgaaggggctgctcgacctcgatgccgacatccgcaccagcggcaacagcgagaaatcctggatcgaccatctcaacggcaacgcacgcttcagcctgatcaacggcgtgctgcccgacgccaacctggagcaacagctctgccagggcatcgctaccctcaaccgcaaggcccttgccggtactcacggcggcaaggacacgcctttccgcgagctcaagggcagcctgaacttcaccaacggcgtggccagcaaccctgacctgaaagtggccattcccggcctggcggtcagcggccacggcgatatcgacctgcgcgtgctgggcatggactatcgcatcggcgtggagatccagggcgacaagagcgacatgccggacccggcctgccaggtcaaccagcgctacgccggcatcgaatggccgctgctctgccgcggcccgctggaactcggcgccaaggcctgccgcctggacaaggaaggcatgggcaaggtcgccgcgaaactggccggcaatcgcctcaacgaaaaactcgaagagaagctcggcgacaaggtcagtccggagctgaaagacgcactcaaagggctgttcaaccgcaaatgacacctgaaggcttcaacggcgcggtcctcgactggtacgaccgtcacggtcgcaaggatctgccctggcagcagggcatcaccccctaccgggtgtgggtctcggaaatcatgctgcagcagacccaggtcagcaccgtgctcggttacttcgaccgtttcatggcagcgttgcccgacgtcgaggcactggccgcggcggccgaggacgaagtcctgcacctgtggaccgggctcggctactacagccgtgcgcgcaacctgcacaagaccgcgcagatcgtggtcgagcggcatgcgggggagttcccccgcgacgtcgagcaactcgccgaactgcccggcatcggccgctccaccgctggagccatcgccagcctgtcgatgggcctgcgcgcaccgatcctcgacggcaacgtcaagcgcgtactggcgcgctacctggcgcaggacggctatcccggcgaaccgaaggtggccagggcgctgtgggaagccgccgaacgcttcaccccgcacgcacgggtcaaccactacacccaggcgatgatggacctcggcgccaccctctgcacgcgcagcaagcccagttgcctgctttgcccgctggtctccggctgccgcgcgcacctgctcggccgcgaagccgattatccgcagcccaagccgcgcaaggcgttgccgcagaagcgcacgctgatgccgatcctggccaaccgcgacggcgccatactgctctaccggcggccttccagcggactctggggcgggctctggagcctccccgaactggacgacctcgacggcctcgaaccgctcgccgcgcgccattccctggccctcggcgagcgccgcgaactgagcggcctgacccataccttcagtcatttccagctcgccatcgagccctggctggtggcggtggaaggcgctccgcgcgccgtggccgagggcgactggctctggtataacctcgccaccccgccgcgcctgggcctcgccgctccggtgaagaagctgctcaagcgcgcagaacaggaactcggacgcggcacggccgcgtgaatgccgggcccgcgggcccggcggcaactgcaggagaacgaccatgagccgcaccgtgatgtgccgcaagtaccacgaagagctgcccggcctcgaccgcccgccgtatcctggcgcgaagggcgaggacatctacaacaacgtgtcgcgcaaggcctgggacgagtggcagaagcaccagaccatgctgatcaacgagcgtcgcctgaacatgatgaacgccgaggaccgcaagttcctccagcaggagatggacaagttcctctccggcgaggactacgccaaggccgacggctacgtgccgccatccgcctgacccccaccccgcccgacggaggccgccatgactccatccctctctggcctgcctccgatccgcaccgcgctgatcggctacggcttcgccggcaagaccttccacgccccgctgatccgcgcggtaccggcgttgtgcctggagcacgtggtctcccgcgaccctgggcgggtgcacgccgacctgcccgaagcccgggtcagcgccgatccggatgaggccatcgaggccgccgacatcgacctggtggtcatcgcctcgcccaatgccacccacgccagcctcgccgaacgggccttgcgcgccggcaagcacgtggtggtggacaagccgttcaccgtcaccctggccgaagcccggcgcctcgccgacctcgcccgtgaacggcctgggcaggtcctctcggtgttccagaaccggcgcttcgacagcgacttcctcgccgtggaggccgccctgcaggccggcagcatcggcccggtgcgctacttcgagtcggccatcgagcgcttccgtccgcaggtccgcgaccgctggcgcgaacacgacctgcccggctccgggctgtggttcgacctcggcccgcacctgctcgaccaggcactgtgcctgttcggcgtaccgcagcgtgtgcacggacacctgcgccggctgcgcgagggcgcgctgaccgacgactggttcgaggtcctgctcgattatccgcactgccaggtagcgctgcgcgccagcatgctcgccgccaatccggcgccacgcttcaatgtgcacggcgaccacggcagcctgctcaaggccggcgccgacatccaggaagcgcaactgctccagggactgcaccccggttccgccggctggggccgcgatcccgacctgctgcagcacatcgatggccagggcctgcgccagtcgctggtcaccccggcaggcgaccagagccgctactaccaggcgctggccgccgccatccgcggccagtcgcgcaacccggtgtcggcgcaacaggcctgcgcgctgatggccctgctggagttggcacgacgctccgccgaggaaggccggagcctgccggtggagctgcgcgacgaggaacgccaggcctggaactgaggcccggcagtccggcggaaaccgcgaggggatcgtaaggcgttaaaaaacaaaaaaaatttcttcgccggtgttgacactgccgcgctaaacccgtttaattgcgccccgttgcccaggtagctcagttggtagagcaggggattgaaaatccccgtgtcggcggttcgattccgtccctgggcaccatgaatacgacgaaaaggctcacctccgggtgggcctttttgctttccgccgttcgcctagacgtgctgcccgccgttgacgtggatttccgcgccattcacgtaggatgcgccgctggtgcagaggaagtagatcagcgaagcgatctcctccggccggccgaggcggtgcagcgggatactgcgctcgacgatctcctcggtgcccggcgacaggatcgaggtgtcgatctcccccggcgcgatggcgttcacccgcaccccatgcgggccgaagtcgtgggccatctcgcgggtcagcgcggacaacgccgccttggaagtggcgtaggccaccccggcgaacggatgcaccttcgagccggcgatggaggtcacgttgatcaccgttccctgcgccgccttcagctcggcgaacaggccgcgcgccagcagcgcggtggagaacaggttgacgttgaacacccgcagccaggtggcgtagtcggtttccagcacaccgaggcgctcgccgccttcgcccttgggcgagatgccggcattgtccaccagcgcgtggagccggccgtcgccaagcttctcgcggatcagttccaggctggcctcgacgccgggaatgtcctccaggtccagatggatgtggttttcctcgccgtccgcccagggacattcgctggcccagctctgccgcgacgcggtgaacacccgccaacccgcggcattgaagtacttcaccgtggcatgcccgataccgcggctcaccccggtcagcaacagggtctttctctccgccatacgccctccgtgaaggcctgctggaatgaacgcgactcgcacagcctacaaggaatgacgaatcgccgcggcggatctttcgcccatcccggcgaacggccgagcgtgagccaggcagtgccgatagactaggcggaccttgtccggacccccgatcgatgctgaagaaaagcttcaactccctgctcaccacctggctcgccggcctgctggtgatgctgccgctggtactcaccctagccttgctggcctgggtggtcagcttgctgaaccgcttcgtcgggccatccagcctgatcggtcgcggcttcgccgccatcggccagccgctcgccggcgattcgccactggcctacctgctcggtaccgcgctactgctggtagccatctacctgcttggcctcggcgtacagctaggcctgaagcggccgctggccaacctgttcgacctgaccctgcggcgcaccccgctgatcggcaacctgtacaacctggccgaccgtttcgtcggcctgctggacaagaagcaggacgccgacatcgccgcgatgagtccggtgtggtgtttcttcggcggcgacggcgccgccgtgctggcgctgatgcccaaccccgaagcggtggaactggacggccgcgcgcactacgcgatcctggtgccgaccgcgccgatcccggtgggcggcggcctgctctacgttccggtggaatgggtgaaaccggcacagatcggcatggacaccttcaccagcatctatgtgtcgatgggcatcaccccaccgccgccgctggccgccgccaaggtgctggcggagccgcgcgcggagcagccgccggcggctccataggcggtcccgcatgcccgggaacggggcgcgcaccgacctccaggctctgcttcaggtcagggttcgccaggagttttcttcgaaagccgacagttttgttcctacgcgacagcgcactgcagcgatgcgacaagatgccgccaaccccgctccagaggcacgcagcctgcttggctccggttgaagcgctgtgctagcttgccttcgccaggaaggcccttccaatccgaataacaagaggaaaatccatggccgaggccacccccgcactggaaatccgtaacctgcacaagcgctacggcgacctcgaagtgctcaagggcatctccctcaccgcccgcgacggcgacgtgatctccatcctcggatcgtccggctcgggcaaatccaccttcctgcgctgcatcaacctgctggagaacccgcaccagggccagatcctggtctccggcgaagagctgcgcctgaagaagagcaagaacggcgacctggtcgccgccgacagccagcagatcaaccggctgcgcagcgaactcggtttcgtcttccagaatttcaacctgtggccgcacatgagcatcctcgacaacgtgatcgaggcgccacgtcgcgtactgggcaagagcaaggccgaagcgatcgagatcgccgagggcctgctggccaaggtcggcatcgccgacaagcgccacagctatcccgcgcaactttccggcggccagcagcagcgcgcggccatcgcccggaccctggccatgcaacccaaggtgatcctgttcgacgagcccacctcggcgctcgacccggaaatggtacaggaagtgcttaacgtgatccgtgcgctcgccgaagagggccggaccatgctgctggtcacccacgaaatgagcttcgcccgccaggtttccagcgaggtggtattcctccaccagggcctggtagaagagcagggaacgccgcaacaggttttcgaaaacccccagtcggcgcgctgcaaacagttcatgtccagccaccgctaacggagcaacaccgcatgaagaactataagaagatcctgctggccgccgctgcaaccctggccttcgccctcgacgccagcgccgccgacaagctgcgcatcggcaccgaaggcgcctacccgcccttcaacggcatcgatgccagcggccaggcggtcggcttcgacctcgacatcggcaaggcgctgtgcgccaagatgaagaccgagtgcgaggtggtgacctccgactgggacggcatcatcccggcgttgaacgccaagaagttcgacttcatcgtcgcgtccatgtcgatcaccgacgagcgcaagcaggcagtcgacttcaccgatccttactacaccaacaagctgcagttcgtcgcgccgaagagcgtcgacttcaagaccgacaaggactccctgaagggcaaggtgatcggcgcccagcgcgccaccatcgccggcacctggctggaagacaacatggccgacgtggtcaccatcaagctctacgacacccaggagaacgcctacctcgacctctcctcggggcgcctggacggcgtgctggccgacaagttcgtgcagtacgactggctgaagagcgacgccggcaaggagttcgagttcaagggcgaaccggtgttcgacaacgacaagatcggtatcgccgtgcgcaagggcgacccgctgcgcgagaagctcaacgccgcgctgaaggaaatcgtcgccgacggtacctacaagaagatcaacgacaagtacttccccttcagcatctattgatgccaagccaggccaccgccgggcgcgtcccggcggtggccgccttcaggcctgacttctcatgattctcgacctgcatgggttcggcgagcaactgctcgtcggtacctggatgaccctcaagctgtcgctggcggcggtctgcgtggggctgttgctcggcctcctcggcgccatcgcgaagacttcgaagtacgcggccctgcgtttcctcggcggcacctacaccaccatcgtccgtggcgtgccggaaacgctctgggtactgatgatctatttcggcacggtgagcggcctgaacgccctcggcgaccttttcggcaagccggacctggcgctctcgccgttcgccgccggcaccctggccctcggcctgtgcttcggcgcctacgccaccgaggtgttccgcggcgcgctgttgtccattccgcgcggccatcgcgaggccggccaggcgctcggcctgtcgcccggtcggatattctggcgcatcgtcctgccgcagatctggcgggtcgccctgcccggcctcggcaacctgtacctgatcctgctgaaggacaccgcgctggtgtcgctgatcaccctcgacgagatcatgcgcaaggcgcaggtcgcctccaacgcgaccaaggaacccttcaccttctacatgaccgcggccgccatctacctgagcctcacggtcgtcatcatggtcgccctgcacttcctcgaacgtcgcgccggccgtggtttcgtgaggaacgagctatgagcgagtgggagctgatcctcaagtggatgccgaagatgctccagggcgcggcgctgaccctggagctgctggcgatcgcggtggtcgccgggctcgccctggccctgccgctgggcatcgcccgcgcctcgcggcactggtacgtgcgcgcggtgccgtacgcctacatcttcttcttccgcggcacgccgctgctgctgcaactgttcatcgtctactacggcctggcgcagttcgaggaagtgcgcaagagcgccttctggccctacctgcgcgatccgtactggtgcgcgctgctgaccatgaccctgcacaccgccgcctatatcgccgagatcctccgcggcgcgatccactcggtgccggtcggcgaggtggaggccgcccgcgccctcggcatgtcgcggcgccaggcgctctggcacatcatcctgccgcgcgcggtgcgcatcggcctgccggcctacagcaacgaagtgatcctgatgctcaaggccagcgcggtggtctacaccgtgaccctgttcgacatcatgggcatggcccggaccatcatcgcccgcacctacgaatcgatgctgttcttctgcctggccggcgcgctgtacctggtgatcaccatcgtgctgacgcggatcttccgcctgatcgaacgctggttgcgggtcgacgccacccagggccgctgagcgggcgctttccgatgcctgcggggcggctataatcgccgccccgttttcccgctgccgcttgcatcgtgtccgaaaccttcccgttcctcactggcgacgccctgtcgcagcgcttcctcgcgctggacgcgttcctcctcgaacaccagcggctctggcgaccccgcccgttcagcgaaccgaccctggcgtgggaagccgaacacgccgagctggcgtcctggctgcgcgggcgcagcctcgaacaggccgacgcggagcacaaccagcccacccgcctggccgcgcccgcgccttatccgcagctcgccgcccaagccacggcgctgggcgcggtcggcgaactgccattggcggaacgcccgcaggcaccgaaccgcttcaacgtcgacgtaccgggacgcaagtggcagcagatcggcctgttcgccgggcgcctgcagttcgcccggccggtcgtccactggctcgactggtgctccggcaagggccatctgggccgcctgctggcccatgcggggcaaccgctgacctgcctcgaacacgatcccgcgctggtcgccgacggacagcgcctgagcgaccgcctggggctctccgcccaccacctccgccaggatgtgctggccgcggactgcgccgagcgcctgcttcccgggcatacgccagtggccctgcacgcttgcggcgaactacacctgcgcctgctgcgcctggccagccaggccggctgtcgccaactggcggtggcgccatgctgctacaaccgcattccggggcctttctaccagccactctcgcaagcagcaggccgatcgctgctcgcgctatcgcttgacgacctgcgcctgcccctgagcgagacagtcaccgccagccaacgggtccgtcgccagcgcgaccagtcgatggcccggcgcctgggtttcgacctgctgcagcgcgagctacgcggaatcgaccagtacctcagcgtgccttcccttccggtggcctggctggaacgtccatacgccgactactgtcgcgaactcgccgccctcaagggacttcccgaaccggccgcgcgcgactggcaggcgctggaagcggccggctggaagcgcctggcgatggttcgcaacctggaactggtgcgcgccctgttccgccgcccgctggaactctggctgctgctggaccgctgcctgtatctggtcgaacagggctatagcgtccgcctgggcgagttctgtccgacctccctgtctccgcgaaacctgctgatccttgcggagcgcagctgatacgggtgttccggatggttgcccacacaacctgtggataagtctggtgacaagttctgggaaacatctgccgaggggcccgtatccaggggcagccaatgctgttcaaaaaatgaacagaaaaaataaaatccatataaaacaatatcttgataacaaccgaaataaccacagcgactcttagagcgtttccttcctatcccttgcccgcttgtgcataagcctggctttccggttaatccgaaagtggacttcggcaccggcaatagttgcaaaacggcatcgtatgacgttcgaaggaacggattgttcttttattgcaacggttgacctcttgttaatcgctgcctaggcagtattattttgaaacactttccctgcctagacagcgatcccccatgggtcactacagcgcttccgactttcccttcaagggctccattggccagctcatcggcgtcagtgccgcgaccaaggaccgcatcctcgagaagcacctcgccgcgctggacataaccgccgcccagttcaaggtgctgatcttcgtcggtctcaaccgtgccaacagtccggtcgaactgtgtcgcgagctgtcggtggacagcggctcgatgactcgcatgctggcgcgcctggagaaaaaagggctgctgctgcgtggtcgctgtcccgaagaccgccgttgcctgcgcctggatctcagcgaagcgggacggaaggtccaggagcagcttccgcttatcgcctcggcggcgatgaacgagctggtcgcctgcctgagcacggaagaattgcagacgctgacccatctgctgaccaaggttctgctacacgccggctgcccgcgggccagcctgcaggagtcctgatccatgccgttccctcttctccatccctggccgcagcgattggcgctggcctcggcgatagtgctggccgccggctgcgtcacttccgaaggcctggaaccgaacgcccgactgcaaccggcaggcgccctccaggcgggcaggagcctggacggcgtagccctttcgccagcggcctggccgcgccaggactggtggaccgggctcggcgaccggcagctcgaccaactgatcggcgaagccctgcaaggcacccccgacctgcagatcgccgaggcgcgtgcgcgccaggcggcggcaacggcccaggcgcaagatgccgcgcgccagccgacgctggacgccaaggccagctactccggcatccgcgcgccgaccagcgtggccccggcaccgctcggcggccgctattcggcgatcaagtacctgtcgctcggcttcaactacgacttcgacctctggggcggcgagcgcgccgcctgggaagccgccctcggccaggccaatgccgcccggatcgacagccaggccgcgcgcatcggcctctcggcgagcatcgcccgcgcctacagcgacctcgcccacgcctttaccgtgcgcgatctcgccgaggaagaactgaagcgctcgcagcgcatgaccgagctgagccagaagcgcatgagcgccgggctcgacagcaaggtccagctgcaacagacgcagacccagctggccaccgcccgccagcagctcagcgccgccgagcaggacatcgccagcgcccgcatcgccctcgccgtgctgctgggcaaggggcccgatcgcggtctcgaactgcagcgcccgcaaccgctgaacccggccagcctgagcctgccctcggtgctcccggcggaactgctcggccgccgcgccgacatcgttgccgcgcgctggcgggtcgaggcggcgcgccgcaacatcgactcggcgaagaccgagttctatcccaacctcaatctcggcgcgatggccggcctcgccgccctgcacaccagcgacgtgttgcaggcgccgagccgcttcttccaggtggcgccggcgatctccctgccgatcttcgacggtggccgccgccgcgccaacctggccgaacgcgacgccgactacgacctggccgtcggccagtacaacaagacgctggtccaggccctcggcgaggtcagcgacgacctcggcaagttgcgctccctggagcagcaggtgatcgaccagcgccaggcccgcgatatcgccaggtccaacttcgacctggccatgcgtcgctacggcgaaggcgtcggcagctacctcgacgccctcagcgtgcaacagcaactgctggtcgccgaacgccagctggccagcctggagagccagcagatcgatctttccgtccagctggtccaggccctgggcggcggtttccaacccgattcccgctccgctgcgctcgctaccgcgaaagcgccggcagaatgaacgaggcacccaccatgactaccgccaacagcgaaacccccgccggcaacccgaagcgcaagcgctggttgctgatcctgctcgccgtgatcgttctcgccaccctggccagcgtggcctgggagttcttctacggccgctggcacgaggacaccgacgacgcctacatcaacggcaacgtggtacagatcaccccgcagatcgtcggcaccgtggtcagcatcggcgccgacgacggcgacctggtgcgcaagggccaggaactggtcaggttcgatcccagcgacgccgacatcgccctccaacgcgccgaggccaacctggcccacaccgtgcgccaggtgcgcgggctgttcagcaacgtcgacggctatcgcgccgaggtcgccacccgcaaggtcgcgctggccaaggccgaggccgactacaagcggcgcaagaacctcgccgacgacggcgccatttcccaggaggaactggcccacgcccgcgacgccctggacagcgcgaaagcctcgctgaccagctcggaacagcagttgaacaccaatcgcgcgctggtcgacgacacccagatcacctcccatccggacgtcaaggccgccgccgcgcaactgcgccaggcctacctggacgacgcccgctcgaccatcgtcgcgccggtcaccggctacgtcgccaagcgcagcgtacaggtcggccagcgcgtgcaaccgggcactgcgctgatggccgtggtcccgctggaccagatctggatcgacgccaatttcaaggaaacccagctcaagcacatgcgtatcggccagccggtggaaatccgctccgacctctacggcagcgacgtgcgctacagcggcaccgtcgacagcctcggcgtgggcaccggcagcgcgttctccctgctgccggcgcagaacgccaccggcaactggatcaagatcgtccagcgggtgccggtgcgcatccatatcgatccgcaagaattgcagaagcatccgctgcgcatcggcctgtcgatggacgtcaaggtcgacctgcacgaccagagcggcccggccctggcccagcagccaccgcgcgaagcgctgttctccaccgatgtctaccagcagcaactggcctcggccgacaagctgatcgaacgcctgatcgaagccaacctcgccgaagaccacggcaagaccgcccagcgttgagcccgccagcatgagcgaaagcagcagcttctccccgcccagcctggtgatggcgaccatcggcctgtccctggcgactttcatgcaggtgctcgacaccaccatcgccaacgtcgccctgccgaccatctccggtaacctcggggtgagttcggaacagggcacctgggtgatcacctcgttcgccgtgagcaacgccatcgccctgccgctgaccggctggctggcccggcgggtcggcgaggtgcgcctgttcatcgccgccgcgctgctgttcgtactcgcctcgttcctctgcggcatcgcccagtcgatgccttctctggtcggcttccgcgccttgcagggcttcgtcgccgggccgctgtatccgatcacccagaccctgctgatctccatctacccaccggcgaagcgcggcatggccctggccctgctggcgatggtcacggtggtggcgccgatcgccgggccgatcctcggcggctggatcaccgacgactacagctggccgtggattttcttcatcaacgtgccggtcggcctgttcgccgctttcgtcgtctaccagcaactgaaggcacgcccggtggtgatcaagaaggcgccgatggactacgtcggcctgatcgccctggtgatcggcgtcggcgccctgcagatcgtcctcgacaagggcaacgacctggactggttcgagtcgaacttcatcgtcggcggcgcgctgatcgcggcgatcgccctggccttcttcatcatctgggaattcaccgaccgccatccgatcgtcaacctgcgcctgttcgcccaccgcaacttcgccgccggcaccctggcgctggtgctgggctatgccgcgttcttcggcatcaacctgctgctcccgcaatggctacagacccagatgggctacaccgccacctgggccgggctggccgccgcgccaatcggcatcctcccggtgttcctctcgccgctggtcggccgctacgccaaccatttcgacctgcgcatgctcgccggcctgtcgttcctggcgatggccatcacctgcttcatgcgcgccaacttcaccaccgaggtcgactaccagcacatcgccatcgtgcagttgatcatggggctcggcgtggcgttcttcttcatgccgatcctgagcatcctgctctccgacctgccccccgaccagatcgccgacggctccggcctggccaccttcctgcgcaccctcggcggcagcttcgccgcctcgctgaccacctggatctggaaccgccgcgccacgcaacaccacgcctacctcagcgaaaacatcagcctctacgacccggccacccacgaaaccctcgcccagctcggcggcaacacccaggcgaacgcggcgctgctcgaccggatggtgcagagccaggcctacatgatgtccaccatcgactacttcaccatgctcggctggctgttcctcgccctgctggtgatcatctggctggcccgcccgccgttcggcgccaagcccggcgcggccgcctccgggcactgagaacgaacggcattcgggcaggaaaatcagtggtttactcctggcggcggctggctataatgtcgccctcttcgccggtatagctcagctggtagagcaactgacttgtaatcagtaggtcccgggttcgactcctggtgccggcaccatctagatcaagggtttacgaagcattcggaggccagcaacaggtctctacgtaataagcgacgtaacaagactagccatgctagcgcggtcgtctgcgccttagcagacgtggcagagagaggcggcgcaggtgacagggcggcggcagacaaccaggttccaacgcccgctccgcctggcaacccctcgttttatgttgacccatcgaaattgggtaattttggtaattcgctttcagaactgccatttattcatttaaattcaatagcttaaagaacctttctaaaggtaataatagggtaattctgaggtaatcgaattacctttgtgctgggtaagctcgccgatttatgaaccacttataaatcaatggtttacaaaaaaattacctttccaattaccctaaattacctttcaaggtaattgctgaaagccagtacccacgcggcatacagcccgcttagaaccccaaattaccgaaattacctttttccgaggggtcaacagaaaaacgtccccaggaaggccccttgccgccctcagaaaagggcctctggtgcagggattcgcagggatttccgagttcggaaatcggaaggcagcccccagcctgggccgttggcggcgctgtgcagaagtgcagaaaaagaggtctatttagagcggaggcgtggcggggggacgactgcgcgcgccggcgaatgagccgatgcggccaggaaacgccgtgtcctactggcggcaagctctaaaagcacaacccctgctaaaaagcaggggttgtcatcggactgaaacacaccctggcgcgttttttcctgcctgtggctttgctaggcgtacgtgtcgtgcctgagaggaaaaaatcacgtcatgcagaatgaagtaggcacctaccaatatccgcagtcgggtttatttttttttcgccaatactaaggcgtggttgtagccgagcagttcaggagcaacaacacaataacgccaaaggccagatggcggccggcccttcagtcataggaatgacaccatgaacgatatcgacacgatcaccaatgcgtgggggcgttggaaaaccgctcaatacggaaccacctgctggttcactgaaagtacccagtacgggcggaacaaggacactcgcggctatatgcaatatcagaccaacgtttccgcgccgaaggacttggtttattccaactttgtgcagcaggacggcggtagcgccctgttggggcagtacgacacgatcaacgatggcagccaggtgattgaacatgtcgtcaacttgcaacaagggttagtggacacctttacctggagcgtcactgagcagttgaaggtcggtgtggaagtcaaggtgaaggcgggcattcccctagtgggtggcgctgagaccaccagtacggtggaagtgtcactgtcctctactcaaggggcgagtaccagcaagtcttccaactatggcgcctctaccaaggtgcctatttccccacatagccacggctggggagaggttgacttgagctttactgagctgcgcactcagtgggtcggtaatgtcgggcttcaaggatgtgtggccatttggttcaacaacaaagtcgcattgaacaacgatggcgattaccactacctatggttcattcccgtggagcaggtattttgggagtgcatccagcacaacatagtcaatacctcgggctatgtcgtacaaggcaatggagtgttggcgcaagccacaggcaccttccatagcagcatgggcttgaacttgaagaccatcgcgcacgagcggccttatccggaaacctcggaggcggtcagaacattctataattatgccagtctggttccggacctagaaacccgagtccgctcggcagagtagaaagccgtaggaagtctggaacagtttctgtccgttaaacgtagaacgcctggcgtgttgcgccaggcgttacaggttgctgacaaagccctggctacaaggccaggctttgtatttagtgagtcctgacctgcccccagttttagtaccgctgcctagttagtaggccctggggttgatattaatttttcctgcttcagctgctgctggcgagttcgccaacttgcagcaaattctgctggggtgagattgccaatcgcgctgtgcggtcggtgttcgttgtaatcccgccgccaggccgcgatgcggattctcgcttcggccagcgaacagaaccagtgctcattgaggcattcgtcccggaacttaccgttgaacgactcgatgaaggcattctgcgtgggcttaccaggctgaatcagcttcagcttgatgtcgcgctgataggcccattgatcgaatgccttgccggtgaactcgggcccctggtcggtgcggatcgctttcgggtagccgcgaaaccgcgccatctcgtccagcgcccgtgtgacgcgaaagccgctgataccgtgctccaccaggatgccgaccgactccttggtgaagtcatcgaccaccgtcaggcatttgatccgccgcccggtgctcagtgcatcgaagacgaagtccatcgaccagacctggtttggtgcgctcggcaaactcagacgttcgcgctccaccgcgacgccatggcggcgccgccgccgtttcaccatcaagccggcagcgcggtacaggcgatagatccgcttgtggttgacctgcacgccagcacgtcgcagcaggatgtgcaggcggcgatagccaaagcgccggcgctcttgggccagttccaccagttgggcttgcagctcggtgttttgcacactggctcgcggctggtagcgcaacaccgagcgggacagcccgatcaactgacaggcacgacgctcggagatgccagttcgcgcctgcatctcctgcaccgcctcccgccgtgctgtcgggcttacccttttccccgggcgaccactttcagcgactcgatgtcgaggtgggcctcggcgagcaacttcttcaatcggctgttttccagttcaagatccttcaaccgtttggcgtccgccacggtcataccgccaaacttggcccgccagctgtagaacgaggcatcactgaagccgtgtcggcgacacagttccttcaccggcacaccggcctccgcctgcttgaggaagtcgagaatctgctcttcggtaaaacgctttttcactgccgtctcctgctcggaaaacggactctactaagtttgacgtggtactgaaatcggggggcaggtcagtcctcatcttctccctagtaccccttgctcggacagctttctcctttacgtggtgatactggagacgctgattacaagcctggagcgtcgaacggcgcgaacctcacgatctcttccccgatcaactcattgacctgctgcaagcgcgcctgcattggctccagttccaggctggcccagaccgctgctgcgtcgctgatggatccgaacccaccggcgttctgcggcaccacccccatcagttgcggatagacccgcagcccggcaagctggtcgtcgcggctgatattcttgatcgagccgaattcgtccttggccgcaacctcgctgactggaatgatctgcaggccctctttcttcccgttcggtgcgtaaacgaacaggttgcggaagttgccgggccctttcgcggtcttcagcgccgtgcggagcgcatccacgtcctcttcgttctgcgcggcgtcggtcatgtagaggatgaatccggcgtggctgccgttgttgtagtacttgcgccggaacagcgtggccgactcgttcagcagggcactctgcagggcgcagaaccactccggcactccgtagatttcctgattgatgtcggcctcgcgcagctggatcacgctgcccttctcgaattcgtgctcatccgtccagctgcgcacctggtagaacgtctccagatcggtgccgcggcgcatgtacttggccagcggcgcctgcagcggcatccgcgtacccaggcgagaacgaggctgctcgaggtaggccgagccgaatgtcagccagtccagggagaactgctcgaacgtcgcccggctgagcaggcggtgcgggatgaaggtcttggccagcatgttgcgcttgaacttcaggcccgactgcaggtagacgctcgaccccaccgccttggccagcccctccatggacagcggcggctcgtaccaccgcccgttcgaccagcactcgagatagtcgaggatgcctcggccgtcgagcaccggcatcgggtcaccgaaggtgaaggtctcggcacggccgccctgacgcgggatgaactcgccttcctgggcggattggactgtaaccggctgctgacggcggtggctgcgacgtttgctcatcagaaaatctccatgcgcccggtattcgcgggggtctgcccctcgagcggttcgttctgcaatgcgtggaatagcgcccaggccagatcggcgtggccggtgttgtcgttgcggccggcggtgtatgtgaactggcgcccaccggccgtgatggtcttgcggatagccatcagcgcctgggccaggtcggtccagccggcgtcgaattcgaggcggccgttcttgatcaccgaccaggccttcatgaccaactgcgtcttcacctcgggcgagtagctgaaggtgcgcacccccgggaagaactggcgcaccagctgcgcgacgccagaccccatgccggtggtgtcgacgccgatgtaggtgacccagtagcgctgggtcaccttgcggatgaactcggcctgctcggcgaagtccttgccgcggaattgatggcgctccagcacgcggaacttgccgcccggtaccgccggcggtgccaccacaaccagacccgcagtgtcgcccgtctcggcggggtcatagcccagccacacctggcgatcaccgaacggtcgcagcgcgaacggtttgtagtcctccgaccacaggtcccagctatcgaccatgcatggctgcagcatggtcagcgggaaaatgctcgcgccgtcgtcgacgaactggcacatcagcaggttctggaaagcctcggcgtcgtactcgagacgcagctcgtcgatgtcgaacaggtcgcagccacgggcctcagcatcgaggatcgtgacgatctggcgccagatgcggtcctcgcacagtcgcccttgctgcagggcgtcatgacttacgtcgatcttgatgcgatcggcagctggcttgcccttgttgaagcgctcgccagtccagaatgtgtaggcctcatgcgccatcgaactgggcgtcgagaaataggtccgccggtagcgcttctgcatcgccataccgctggcgaccttgttcagctccttgaacttgaacgtccagaagaactcgtcgaagtagaagttaccgtggtagccctgggcagtccgcgcgttggtaccgaggaagtgcagttccgcgccgttcggcaggatgatcgggtcgcccttcagttcgacacctaccgcatcgcgcgcgaaggcctggatatacgccttgaagatgtgtgcctgggccttgctggccgacaggaatatctggttgcgccccgtttccagcgcgtcgatcagcgcctcgcgggcgaagtagaacgtggcgccgatctgtcgcgacttgagaatcacgcgggttcgctgattacccgcgcggtaccagtctttctggtagtcgaagcaaccgtcgaggaaggcctcgaccagtttctcggtcagttcctcgctgatgtcgttgcgcttgggcttgcgcttgggaccttcgttacgcttggcaagctcggggttcaggtcggtttcggtaccaccgccctggtagcgctggatccgcgcctggcgctcaagctgccgatgcagcaggtcgatttccttgtagtcaccgccggtcttgccgtccttcaggatcaactgaaccaaccgggcttccagggcgcctccgatccgttctacgctgtcggcccggtcccatccgtcgcggtccttccatgagtgaagggtcttgtccttctcgcccaggtgatcggcgatgtcgcagacacgccaacccatccagtacaggaatttggcctggcggcggttgtcacggatgggaatttcgacggcagcgttcatggcgcagatgctgccgcccaccctcgcccctcagtagcgccgccccttgtagctccgcgccctacaatcccgcttgattgctgggccgcgcgcgcgtcccgaacatgcccctcattgccatgcaccccgcatcagccgcattgaggactcccggcatgaagaaattccgcagcaaatggttccgcatcgccgtcgaaggggcgaccacggacggccgcaacatcgagcgcgactggatcgagcagatggccgcgcagtacgacccgaacacctacggcgcacggatcaactgcgagcacatcaagtgggcctggccggctggtgagttcggcgcctatggcgacgtgctggcgtgcaaggcggaagagatcgacatcaacgggcagaagaagctggccctcttcgcccaactggagcccaaccaggcgctgctggaactgaacaagcagcggcagaaggtctacacctcggtcgagatcgatcccaagttcgccgacaccggcaaggcctacttggtcggcctggccatcaccgactcacccgccagcctgggtaccgaggcgttgtccttcagcgccaagaacgggaccctcgccagccgcaagaccaaccccgacaccctgttcagcgctgccgaagagggcaccctcgagttcgaggaatacgaggacaagccctcggtcggcgcagcgctgttcaccaaggtcaaggaactgctcaagggcaaggaagcccgcacccaagccgagttcggccaggtcggcgaggccgtcgaagcgatcgccgagcacagccgcgacctgggtgagcaactcggcgagcagaagaagcagacccagcaactggccagccagctggacaaggtcaccaaggaactggcggacctcaagagcaccctcgatagcacccgggaccacagccaacagcagcggcccccggtcaccggtggcggcagtgtcgccctgaccgactgctaaccgtcccccgccccggtatccaaaggaaaagcaccatgcgcaacgaaacccgcaaacagttcgacgcctacctggcgcagctcgccaagctcaacggcgtgaactccgccgtccagaccttcgccgtcgagccgagtgtccagcagaagctggagcaacgtattcaggagtccagcgagttcctgaagcagatcaacgtctacggcgtcgacgagctgcagggcgagaagatcggcatcggcgtcagcggcaccatcgccagccgtaccgataccactggcgacggtgtacgcaagccgcgtgacgtgtccgcgctcgacaaccagcgctacgagtgcaagcacaccgatttcgacaccgccatcacctacgccatgctcgacgcctgggccaagttcccggagttccaggccctgctgcgcgacgcgatcctcaagcgccaggccctcgaccgcctgatgatcggcttcaacggtaccagcgccgcggctactaccaaccgcgccgccaatccgctgctgcaggacgtgaacattggctggttccagcagtaccgcaacaacgctccggcacgggtactgaaagaagggaagaccgccggcaaggtggtagtcggcaacggcgccgacgccgactacaagaacctcgacgccctggtgttcgacgtggtcagcagcctgatcgatccctggcaccgccgcgacccgggcctggtggtgatcctcggccgcgagctggtccacgacaagtacttcccgatggtgaacaaggaccagccggcaaccgagaagatcgccaccgatctcatcctgtcgcagaagcgcatgggcggcctgccgccggtggaagtgccctacgtgcccgagaagggcctcatggtcaccaccctgaagaacctgtcgctctactggcagatcggcggtcgccgccgctacttgaaggaggtaccggagaagaaccgcatcgagaactacgagtccagcaacgacgcctacgtcgtcgaggactacggcctcggctgcctggtcgagaacatcgaagtcgcggagtagatgacatggccttcagtcccgccaaggcgcacttcctgcgcgtgaccgccgctcaagaggcggcggccactgccccgcaccagggcatggaaggcgcgaacgcctatgagctgcagctcgcccagctgtatcaggatcgcagccgcctgaagaacatccagtccggcgaaggcaaggcagcgctcaaggtcgagttgctaccggcctaccagccgtacatttccggcgtgctgcaggccggcaagggcgcccaggacgaggtgatcaccaccgtcatgctctggcgcatcgatgccggcgattacgccggcgccctggacatcgccgactacgtgctcgcacacgacctggtcatgcccgaccgcttcgcgcgtaccgccggctgcatcatcgccgaagagatcgccgaggccgcgctcaaggcacagaagaccggcggcagtttcgaccttgcgaccttgcatcgcacccttctgctcaccgaccaggccgacatgcccgacgaagcccgcgcgaagctctacctcgccgccggccatgccaccctggaaggcctttctgtggagagccccggtcaacccgggcaggtgcaagccggcatcgatctgctcaagcgcgcgatccagctgcacgacaagtgcggcgggaagaagaatttggaggccgccgaacggctccagaagaaactgaccgcctctggcggttgaccgagcgtaccccgcgccccgccggctcggggccgatctgccaggtcctctccttcctgagcagtgacgccccgaccaccggcgacctcaagcgagcagcagcatgagcggattcatcgccaacggcccggtcccgagcgggcacatcaacagcgatcccttctggcccaccatcgagctcgagcatgtgcgggcgaacctgcgcatcgactccagcgtcgatccggcgcgcctcgaagttgcggtcattgccgcggtgatcagcgtcaaccgagagctgcgggcctggcgccttgagaagagcgcggccggctatgccgaactcgccgaagtgccgtccgacaaggtgcgggacacctccgaactggtgcagctgtatctgcgcgcagtgcagtctgccaccgctgccgaagtggccgagcgctaccgctggtacgacaccaccaccagcggcaatgacaaggcccaggacatcgcaaccaccatcgacgactaccgccgcgaccagcgctgggcgatccgcgactttctcaagcgtccccgcacaacggtggagctgatctgatggccgccgtcgcgatcgcccaccagaacgacaccgtcgaggcgctgtgctggcggcactacggccgcaccgccggcgtgaccgaggcggtcctcgaggcgaaccacggcctggccgaccacggccccaccctcccccctggcctcaaggtcaccatgccagacattccgacagccgcccgggaacggcagatggtgaacctatgggactgaccactttgcaaggaaccaccccgcatggctgacctcaccaccaccgccacggccggcgccatcatgggcctcggcctgggcgtaacccttccggttgacggcggcatgctgttcggcgccctgctcggcgcctggctggccaccggcacgaagcaggacctgaaggcctggtcgcgtctgctgtcgctgatcctgccgacctgtgtcggctacctgttcgccgatgttgccctcgcccgtgtgccctggctgaccaacctggccttctctgccttcgtctgcgccctggtggtcattcctctcagcctcaaggcggtcgcctgggtcgacaaggtcgacttcgacgacctctggcgccgcatccgaggaggtcgctgacatgctcatgactaccgttccgttgatcgccgccctggcctacatcgccgcagcgctgcgcctggtctgctaccagcgctgcggcgctcgcttccgccgcagcgtctcgttgctcgccagcctgctcggcgcatccatggccatctgcggcctggaaatcctgctctaccgcccaccggtcagtatctggcacgccatcgtcgccgccctgctgtgcctgctgatcttccgttcccgcggcaacgtcgccgccctgctgaggccatccgcatgacccttcgatatggtgatcgttctcaagaggtccgccagcttcagcgtcgactgaacacctgggccggcgccaacctctacgaggacggccacttcggcgccgccaccgaggacgcggtgcgcgccttccagcgctcgcatggcctggtcgccgatggcatcgccggcccgaagaccctggccgctctcggcggagctgactgctcgcacctgctgcagaacgccgacctcgtcgccgccgcaactcgcctcggcctgccgctggcgacgatctatgcggtcaatcaggtcgagtcgaacggccaggggttcctgggcaacggcaagccggcaatcctgttcgaacgccacatcatgtaccgccgtctcgccgcccacgatcaggtcaccgccgaccagttggccgcacagttccccgcgctggtgaatcctcgcccgggcggctatgccggcggaaccgccgagcaccaacgcctggcgaacgctcgccagatcgacgataccgccgcactggagtcggccagttggggcgccttccagatcatgggtttccactggcaacgcctgggctacatcagcgtgcaggccttcgccgaggccatggggcgcagcgagtcggctcagttcgaagcgttcgtccgcttcatcgacaccgacccggcgctacacaaggcgctgaaggctcgcaaatgggccgacttcgcccgcctctacaacggccccgactacaagcggaacctctacgacgtgaagcttgagcatgcctataaacagcacaccgaagcgcacaaggagacgacatgagaaccggcgcgcagtctggggagcacttcccctacaaggagcttttggagcgcatgaccaagctgtctccgactggttgtgtggccgtggtactaccgcgcgacacaccgatggaggactgccaaaagatggccgacgcgctcaagcatgtgatggctgttcctccgctggtcatctgcggtgacgtgcagtccctggatgaagcggccatgaacgccgccggctggtaccgaaaatgacgactctccgccaggccctatacggcgccgccctgctcagcgccctcggcctgctcctgtgggtgcagcagcagcgcatcgacctggcgcaggcccgcctggcccaggccgagttggcgaggaaagccagcgacgcccaactttctcgccaggccgacaccatcacggccctcgaggccgccctttcccgcgagcgtcaggcccaggccgatctggaccaacagcggcagcagctgcgccaggcgctggccatccgcgaacgcttgatcgaggacctgaaacgtgacgatgaaccctatcgccagtgggctgaccagcctctgcctgatgttgctcgccggctgcaacagcgccccgctatcaccggagcggccgcttaccatcagtggctgtcccgccgtgacgccctgcagcctggaatcagcggcaccgaaggacaacggcggcctacagactgaagtcgagcgtatcggcctggcctgggccgagtgcgccgcgaaggtcgacatgatcatccgcacccaaggggctgctacccatgaacaagcccgatagtctgaaggcacatctgctcgccgccgtgccggaactcaggaacaacggcgaccgcctggtgatattcatcgacaatggcagggtccgcagcacctcggccgagagcctgtccttcgaatacgcctatgacttgcagttgatcctcaccgacttcgccgggcaccccgacagcgtgtttctgccgctgctcggctggctgctggtgaaccagtcggatctgctggccaacctcaccaaggtgcaggacggcatcaccttcgaggccgacatgctcgaccgcagcaaggtcgacctcggtatcgttctgccgctgaccgagcgtgtcgtcgtcaagcgccgcgaggatggccgctacgacgtgagtcacccggaagagccccagctcaccgaggccatcgaggtcgatgggccgatgcagatgctcgccaacggcgagctgctggccgagtggacgccgccgacgcctaccgaggccgtcatgctcgagacgccgcagatcaggcgcccggccaatggctgacagcctcgaggctctggaagactgggcagggccgattctacgcgccctcgagccaggccctcgtgctgccctcgcgcgttcgctcgcccgcgatctacggcgcagccaacagaagcgcgtgatggcacagcgcaacccagacggcagcgcctacgagccacgcaagaagcgcgaactgcgcgacaagcagggccgtattcggcgcaagatcaagatgttccagaagctgcgcacggtgcgctatctgcgcgccaagggcgacgcccaggcgatcaccgtttccttcgccggccgggtcacgcggatcgcgcgagtccaccagtacgggctgaaggatcgcgccgagcgcggcgccccagaggtccgttatgcgcagcggcgtctactcggtttcaccgaagccgaccttgagatgatccgtgaggggctgctcgctcacattccagcctgagcatgtacacgtggccgctacaaacgccgctggctgcctcccgcgcgcgcgtcgcccactatcggcggcatgaacgacttcgccgccctctcccgcatgatcgagaacctgatccgcctcggcaccatcgccgcggtggaccatgccgcgcagcgcgtccgtgtgttgaccggtgacctgctgaccggctggctgccctgggcatcgccgcgggccggcgccgaccgcgaatggaacgcccccaccctggacgagcaggtactgctcttcagcccatccgggcagaccgccaatggcgtggtcctgaccggcttgttcagtgacctgatcccgcccaacggcgaccgcgacgccctgcatcgcatcacctaccgcgacggcgcggtgattgagtacgacagcgcagcccaccacctgcgcgcagttcttcccgccggcggtaccaccgagctcatcagcgacggcggcatccgcatcgtcggcgacatcacccaccaaggcgactacatccagaccggcaaccagaccgttaccggcaaggtcaccgtgagcgtcgacgtgatcgccaagggcatcagcctggtcggtcatacccacggcggcgtcatgccgggcggcgctacgacggggaaaccgcaatgaacgcccataccggtggtgccatcgaccgcgcggcccacatccgccagtcgatcgccgacatcctcaccactcgcatcggcacccgcgtcatgcgacgcgaatacggcagccagttgccggagctgatcgatgctccgttcaacgacaccacccgcctgcaggtctatgccgccaccgctatggccctcatgcgctgggagccgcgcatccgcctgagccgtgtccagatcaccggccagaacctggccggccaggtgctcatggagattgacgccaccctggtggacagcaatgagcctcacaacctgagcatccccctgcagatgggcgccagcgcatgacaacgaacttcgtcgccatcgacctcagccagttgccaccaccacacgcggtggagcagctggactacgagcagatactcgccgagcgcaaggcctacgccatcagcctctggccggaggatcagcaggcggaaatcgccgcccgcctcgccctggagtccgagccgctgaccaagctgctcgaggaaaacgcgtaccgcgaaatgctctggcgccagcgggtcaacgaggcggctctcgccaacatgctggccagcgcccagggcgccgacctcgaccagctcgccgcgaactacaacgtcagacgcttggtcatccaacccggagatccgtcgaaggtgccgcctgtgccggaactgctggagtccgacgacagcctgcgcgagcgggcgcagatggcctgggaaggcctcagcaccgcgggaccgcgtaacagctacatcttccacgcccgcgccgccgacggccgcgtcggcgatgcctcggccgtcagcccatcaccctccgttgtcgtggtgacggtacaggcagcccagggcaacggcagcgccccggcggacctgctggacatcgtcgatgcctacctcaacgacgccgaccgccggcccgtcgcggaccgcctgacagtccagtccgcccaggtgctcgagtaccgtgtcgacgcgacgctctacctggccaccatcggcccggaatccgagccgatactcgatgccgcccgggcccgcttgacggcatacgtccatcagcgtcgacgcctgggcatggaagtgtccgaatcggcggtgcatgcggccctccacgtggaaggcgtgcgcaaggtcacgctcagcaactggtcggacatagccgccacaccagcccaggcgccctactgcaccggaattacgctgacgctgggggatgagtgatgcccagcttgctcccacgcaacgccaccgaacttgagcgcctggccgccgaagccctggcgcagattgagcgggtaccgatcccattgcgccaactgtggaaccccagcacctgcccggtcacccttctgccgtacctggcctgggcgttctccgtcgatcgctgggacagcacctggccggagcgtgtgaagcgccaggtcattcgggatgcctacctcgtccactcccacaagggaaccttgagcgccctgcgccgcgtggtcgagcccgtcggctcgctgaccgacatcctcgagtggtggcaacagacccccgccggcgtccccggcaccttcgaaatcaccgtcgacgtcagcgacaacggtctcgacgaggagaccgtgctcgagctcgagcgcctgctcgacgacgtgcgcccagtcagccgacacctgacccgcctggacctgcgcatcacgccggacatcctggcccgccacggcctggcgacgatcgacggcgacaccctggaaatcagcccctggaagcagtgatatgacgactcccaagtacggcggcctgctcaccgacatcggcgcggcagcgctgatcgcggcgagcgaagccgggaagaagtggcagcccacccatatgctcatcggtgacgccggcggcgcgcccggcgagacggctgaccccatcccctcggccgctcagaccaagctgatccgccagcgctaccgcgctcaactgaaccgtctgttcgtctccgagcaaagcgcaaacgtgctggtcgccgagctggtactgccgatggccatcggcggcttctggatacgggagatcggcctcgaggacgccgacgggaagttcgtggcggtcgccaactgcccgcccagcttcaaggccagcgtcgagagcgggagcgcgcgcacccagaccatccgcgtgcagatcatcctatccggcatggagcacgtcgaactgatcatcgacgacggcatcgtctacgccacccaggactgggtgacggcgaaggttgccgcggacttcaagggacgcaaggtgctggccggcaacggcctggtcggcggtggcgatttgtctgcggatcgcaccatcgccttgccagcctccggcgtgggtgccggcacctaccgtgctgtcaccgtcaacgccaatggcatcgtcaccgccggcagcaacccgaccacgctgggcggctacggcatcacggacgcactgcatgccagcgaggcggtcactaccccgacggcgaacaagctgctcaggctgaacgcggccgggctactaccggcctcgattacgggcaacgcagccactgccagccggcttgcagcgcccatcacgctcagcgcgagcggcgatgcaacgtggtcagctcggttcgatggagctacaaacgtcaacggagtcctgacgctggccaactccggcgtcaccgccgggacctacgcgaaagtcacggtgaacgccaaaggactggttaccggagccactgggcttgtagcgagtgatattccggcccttgatgccggaaaaatcacctccggcatcttacctgctgccagaggcggtaccggcaatggtattggtcaggctgcaacggcggtcaaactcgccgcccctcgtacgatctccctcggtggggacgccagcggctcgacaacgttcgacggtagctcaaacgctggaatcacggtcacgctggcgaactcgggcgtaaatgccggctcctaccccaaagtcaccgttaacgccaaggggctggttacgggtggcggtggcctgacggcagcggacattcctgcgttggatgcttcgaagattgctaccggccgactcgatcttgagcgcttgccgttggtctctcagggactggccacggctgtgcataccagcgttgatcccaactcggtagtcattccgcttgtgctgaccaaccacgcgaatggcccagtggctggccgctactactacatccagacgatgttctacccgagcgtcgaaggcaacgcgacgcagatcgcaaccggctatgccggcgtggctgatatgtacgttcgttatgcctacggctcccccgcaacgaccgatccttccaagcgagagtggtcagcatgggtccgctgcgatctgggaggggcgttcgctcatgcgccggatggcgtcctgggtggcggagtcaacttggattcaatgattgcgtcgggctggtggcatcaaccgttcagcgcgaacgcacagaacggcgcgaactatccggtgggcgaggccggcatattgacggtgcatgctccaacctcctcgatgatctatcagacctatcgtggctatgccgctggcggtctgtactggcgctgcagatacaacggcacctggggaggatggttccgggcatgggactccggcaacttcaacccggccaactacgtggccaagtcggagtacaactggtcttcgctgccagggaagccggcaaccttcccgccggcagggcataaccatgacgctagccagattacctccggcatcctgccgctggctcgaggcggccttggggcgaacaatgccacgacggcgcgtagcaacatcggagccggcaccatcgccacagcatccttgggagcaagcggttggtggagggacaacgatacgggttacatccggcaatggggccgggtgactgtgcctggtgatggtaccgcggcgatcaccttccccatcgcgttcccgaatgtctgcttgggcgggttcgctggtcaaactgcgaatttccacccaggaaccgacgcgagcacctcgttctataacccgtcgacgacaggtgcaactttggaaaacgggtatcaattccaggcggttttgctttgggaggcattcggtcgatgagcgctagctatgttttctcgccgtccgcgagggtcttctaccccgtgtccttgcgcgaggtctacgaggccgggatcggctggccggatgacggcgtccccgtcagcgatgaagtacacgcccgcattctgctagaacaggagtctggccgtgtgatctgcgcggacgccggtggacagccagcaacgaaagaaccaccgccgcccacagaggaggtgcaagccgcgattgagcgcaactggcgcgaccgccagctcgtcgacaccgacgccctggtcgcccgtcaccgcgacgagctcgaggttggtaccacgacgctcaacgcggagcagtaccaggcgctgcaggcctaccgccgccaactgcgcgactggccggagtccggtgagtttccgctcgcagaacaccggccgaccgcaccggactggctcgacgccctcttcgcagatggcgtcttgtagcttcccgacctacaagcttcccgcctcgccccatcgccgcgcgcgcggcagcctgtgcagtgtcatccaaccactgcacaggcacaccccatggccgctgaccaataccatcacggtgtccgggtccaagagatcaatgacgagacccgccccattcgcaccatcgccaccgcgatcatcggcctggtagccaccgccgaagacgccgacgccaccgcctttccactcgatacaccggtactcattaccaacgttcaggccgccatcggcaaggcgggcaccagcggtacgctgcccgcaagcctgcaggcaatcgccgaccaggccaacgccgccactgtggtggtgcgggtgaagccgggtgaggatgaagccgcgaccaacagcgcggtcatcggcggcgtcagcgccgaaggcaagtacaccggcatgaaggccttgcttgccgccaaggcccgcttgggtgtggtaccgcgcatcctcggcgcgccgggcctggatacccagccggtcgctaccgcactcatcgccatcgcccagcagttgcgcagcttcgcctacgtctccgccaatggctgcaagaccaaggaagaggccaccgcctaccgcgagaacttcgccgcgcgcgaagctatggtgatctggccggacttcctgacttggagcaccgtggtcaaccagaccgtacctgcgccagctgttgcccaggccctgggcttgcgcgcccggatcgatcaggaggtcggttggcacaagactctgtcgaacgtcgccgtcaacggcgtgaccggcatcagcgccgacgtgttctgggacctgcagagccccagcaccgacgccaactacctcaacgagaacgaggtcaccaccctggtgcaggaagggggattccgcttctggggttcgcgcacctgcagcgatgatccgctgttcgccttcgagaactacacccgcaccgcccaggtgctggccgacaccatcgccgaagcgcatatgtgggcggtcgacaagcccatgcacccgtcgctggtgcgcgacatcctcgagggcgtgaacgcaaagttccgcgaactcaaggggctcggcctgatcatcgatgcccaggcctggtacgaccccagcatgaacgacaaggacacgctcaaggccggcaagctgcgcatcgcctacgactacaccccggtgccgccgctcgaggacctgaccttcttccagaagatcaccgacagctacctcgtcgacttcgccagccgcgtcaacgcctgacgcccagcgctccccggacggggagccgacccacctgattccgggagagccctaccatggccatgccgcgcaagctcaagaacatgaacctcttcaacgacggcggtagctaccagggcctcgtgaagtcctgcaccctgcccccgctggcccgcaagatggaggccttccgcgggggcggcatgaacggcccggtcaaggccgacctcggccacgacgacgacggcatccagttcgagtggaccgtcgggggcctggagctgaccgtcctcaagcagtacggcgcagtcagcgccagcggcgtgatgctgcgtttcgccggcgcgtaccagcaggacgatacaggcgcggtcacgtccgtcgaaatcgtcgttcgcggccggcacgagaccatcgaaatgggtgacgcccagcccggcgaagacaccgagcacaagatcaccaccacctgcagctactacaagctcgtcgtcaacggcgaggaagtcatcgagatcgacctgctgaacttcgtcgagaaggtcaacggcaaggacctgctcgaggcacagcgcaaggccatcggcctgtaatcccttcccgccggcccgaccggcggttcctctcccccttggataccgacgcccatgaaaaccgaacagactcccgctgacctgcagaacgctcccgacaacgtcgtcaccctcgaccagccgatcaagcgcggcgcccagtccatcgaatcgctcaccctgcgcaagccctcatctggcgaactccgcggcctgcacctgctcgacctgctgcagttcgacgtgactgcgaccatgaaaatcctgccgcgcatcagccagccgaccatcaccgagcccgaggccgccggcatggacccggctgacctgctcgcctgcggccaggtgatcgccggttttttgctgcagaagcgggcgaaggcggcagcctccctgatcgcgtagaaaacgccatggccgacctggccgtgacgtttcactgggcgccggaccatatggaccggctctcgctcaccgaactgatggaatggcgcgaacgcgcccgggtacggagttccgccgatggcgaatgacctgcagctgcgcgtgctgctcagcgcgatcgacagagccaccgctcccctgcgtcgcatcatgcaaggcagcgacgcgacggcccgggcgctcaaggcaactcgcgagcgcctgaagcagctcaacgctcagcagagcgacgtgcgcgcattccgcacccagcgcggcgccctggagcaggtcagcaccgcgctggccgcgcaacaggcccgagtgaaagcgctagcccagcagatggctgccgccggcaaccccacccgtgcgctcacccgcgactacaaccgggccatccgtgaagccggtttcctcaagcagcagcacctgcagcagagccaagccctgcagcaactgcgcacgcgcctcagcaacgccggcatcagcacgcacaacctcggcgagcatgagcgcgacctgcgggcgcagatccaggcggccaatggcgccatcaacagccaggcgcagcgcttacgcaacctcagccagcagcaggagcgcctaacccaagcccgcaacacctacagccgtggcatccagagcgctgccgcgctggccggcaccggcatggcggcgcgcgcgacgggcatgtacaccggcgacaagctgcggcagatgctcggcgtgggctacgagttcgacgcaacgatgtcggccacccaggcggtgacccgcatcgagcgcaaggacgatccgcagatgcaagcgctacggcaacaggcccgcaccctgccgctgtccagcaagttcaccgacaaggaagtcgcccagggccagtacttcctgggccgcaccggctacaacgcgaagcagatcctcggcgccatgcccggcatgctcaacctggccgccgcgggcgacatggacctcggcgacactgctgacatcgcctcgaacatccagacggcgatgggtattccagccgagaagatggaccaggtggccgacgtactgactgcggcattcacccggaacaacgtcgacatccgcatgctcggcgactcgctgaagtactccgccggcgtcggccgcgagtacggccagagcctggagacggtcaccaccgccacggctctgctcggcaacgccggcgtccagggcagcatggccggcacctcgatgcgctctgttctgacccgcctgggcacgtccaaggcggtagccaagctgggcgtccagaccaaggatgccaacggcaacatgcgcgacatgctggacatcctgaaggacatcaacaagaagaccgccggcatgggcaacgtacagcgcggcgcgatcttcaaggacatcgccgggcagtactcggtgaccagcttcggcaccctgatgcgcgccgtcgagggcggccagttccagaccatgcgcgaaagcctgaacaactccgagggcgaggccgcccgggtcgcggccacccaactggacaacctcaagggcgacatgaccatgctgcatgccgccctggaaaacatttcggtcgagctgttcgacaagaacagcccctggctgcgcgaactcgccgccgacctcagtcacctgctgcacaacgtcggcgagttcctgaaggccaacccgcaagtcagcaagggcatcgtcatcaccgtcgccgcgttctcggcgctgatggccatcgttggcagcctggccatcaccctcgccggcatcctcggcccgatgatcgcggtccgcttcatgctcagcaccatcggcattcgcctgcccggtctgatcggcttgctgaaactgctgttcgcaccgatccgcatgctggccggcctgttgatcggcccactggtgaccgccctgcgcgtcgtgagcatcgcgctgtggggcgtggcggccaacccggtggtcctggcaattgccgccgtcgtggcggtgctggccggcgccgcgtacctgatctatcgcaactgggacgccgtcaagacgtacctgctggggctgtgggaagagatcaaggcaggtttcgacggcggcatcgggggcattctttcaaccctgatgaatttcagccccctcggtctgatctaccgtgcgttctccggcgtcctgggctacctaggcatcgacctaccggcacgcttcaccgatttcggcaacatgattgtccagggcctggtgaacggcctgctcgccggcatcgggcagatcaagcgcgcggtccagcgcgtcggcggcgccgcgatcgactggttcaaggacaagctcggcatccattcaccgtcgcgggtgttcgccgatctgggcgggttcaccatggctggcctggctcagggcctcgacgccggccaggccggcccgctgggcgtaattgcgcgtatcggccagggcctggtcaacgcagggcgccaggctgtcgccggcctggacagtgagctgacccgaggcacccgctctacgatcaccccgccggcagtggtgaccgaactggtcgcggcccaacggcaacgctcgccgatgttcgaccagccgttgctggccatgctgggcgacctgggcaagagcgccggcgccatcggtgccctggtgctcggcgccagcgccccagcgcaggccatcaccatcgacaaccgtcccccggtcagctcggcgccagcggcagtcagcatcggcggcgacacctactacatcaccatccaggccggcgcgggcagcgacgccgcagacctgaaacgcacgctcagccaactgctggacgagcgcgaacgcaacaaggcggcgcgcctgcgcgcccgcctgcaggaccgggagtaaccatcatgatgttgtccctcgggatgttcgtcttcagcctgcacacgctggcctatcaagagttccagcggcagaccgagtggcgacacgccagcagcagccgcatcggcgcccagccggcgcgccagttcgtcggtcgcggcgacgacgcgatcaccctgcccggcgtgctgctgccggagctggccggcagcgcgttgagcctggacgtgttgcggcagatggctgacaccgggtcggcctggcccatggtcgagggcaccggacgcatctacggcctgtgggtgatcgagcgtgtcaccgagacgcggacactcttcttcgccgacggcaccccgcggcggatcgagttctccctcgagctcaagcgcatcgacgacggccgcaccgatctgctcggctcggtcctcggtaccgccggcaacctgctgagacgcatcctgtgatcgatgccgccctcgcccgcgtgacgggctacctgaccagcgcggtcgaccaactgcagcgcgacgccggctacccggtgccggtgttccggctcacagtcgacggcaacgacatcgcccagctcatcagcccacgactgatcgccctggacctgaccgacaatcgcggcctcgaggccgatcagttgagcgtgacactcagcgatcatgacgggctgctcgcgatccccccgcgcggcgccgtgctgcacctctggctgggctggagtgacagcggactggtcgacaagggcacctacaccgtcgacgaaaccgagcacagcggcgcgccggacgtgctcagcatccgcgcccgctcggcagacctgcgcaagggcctgaaggtcaagcgcgagcgcagctggagcagcccgaagacgttgggcgacgtgctcaccgacattgccctcggcaacaacctgaagccggtgctcgcgccggcgctggcgggcctgccgatcctgcaactggaccaggccaacgagtcagacgccaacctgctgacccgcctgggcgaggacttcgatgcggtggccaccgtgaaagccggctgcctgctctgcctgccggccggcggcggcaagactgccagcggcctggcgctgccgcacatcatcctcacccgccaggatggcgaccagcaccgctacctgcaggccgaccgcgacagctacgacggcgtgcgcgcgtacttctacgacgtgaacagcgcgaagaagcaagaggccatcgccggtgccaagggcgacaacctgaaggacctgcgccacacctacagcgaccgccagagcgccctgcgcgctgcccgcgccgagtggaaccgcctgcagcgtggcagcgccacgctcagctacgtgctcgccagaggccgggcggacctgatcccggagctgacctacaccctgcagggcgtgaagacggagatagacgcgatcatctggtacggcggcaatgtgcagcacagcctcagcgccgacggcggctacatcaccagcctggagctggaaagcaagttgcccgaggacctggtcagcgacctggccgacgacaccggcggcgactacaccggcatcatcgcctactaccgggacgagaagagcgggacggagaagaccatcaccgcgggagaccagagcaagccgcgccgcctgcgctacctgtacagcaccaaggccagcgcgaagcgggctgtcgatcgagaatggaagcggctacagaaatcgcagatatgactaataaagattgatctggtttttacctaatcttctatgccttctaattttcgccttgccctgatctcttcttctatccgttcttcttgtagctgcataagagttgaaggcagtttcaatgagtacaaaaaacagaatattgccagaaagaggtaaatatattcaacaaagtcattcacctctgagttatttttctttagcagaattgacaggaatatcagagcaatagttgcaagatacgcagtaaatagaaacttatgacgtttaaggcgtcgataaataatttcgctactcaatctcgccacttgccatgacccagaaggcagcgacttcggatcaccaatcatcgttattatgccaacaagaaaaccagcaagaatagaataggcggttacaattacactcagtgcctccgagttctccaacatcaacggcttggccaaaaaagcgccctcacagcttaaaatagctgcgtaacagaagaagcgaattcttgaccaatccagttgttttttcactgagccagcacaccactacttttaagcctatcgtagtaccccttcagcttatcaaacgtatccgacttatcaatcgacttaccaaaaactttaacatgatagctgtcagatacgcgaatttcggtaggggtaattacattcccagccatagttacaattttgaatccatcttcatcaaacccgaggtattccttatcctcgtactctttgattatttcttccgatgtcttcttcagacggctcttgccgatttcaccaaagcctaccggcttgcccttacgtctggcctcacgaccgtcaaagttgagcgatatctttatattaagattttcctgttctttgatctccttcagattggggtctttggcaaacatatcctcaaatagttccgccgcttttttgagcagctcgtcaatctttttctgagaagccttcctcttagatacattcatttcagaaatactagcatcgtaaagagatgctcctagctctattgacttcactccctccgtagcaaccatagccaacttgcttgccttagcgattttctccaagtcaaacgaagccagcatcttggagtacttgcatttttttaacacattgtaaatataagaatgaacaacactctcacgtacgccagacgggcacaaaatgagatgattatctttcactagtgcaaaaatgtcgccgctgagaaaatcgcgtccggccgatgcagcttcggcatgtagctttgaacgctttacacgcttactcttttcaattgtggtggtctgttcgtccggcacataactggctatatgcagaaaaagcccttctcccgggcgaggatccgcatcagcgccacgaatttctccttcgccagagagaaatgtacgatcaccaacagtgcttagttcttcgtggcaaatcgtaagtattttctcaagggaaggttctttattcatctcatcccatttagctcgacgatagtagaacgggcgtttcttcgttttttctttaggtgccattaatgcctcctatggcgtaccggcaaagtcgccgcaagatttaagtggtacatcagcgaaaggaaccatctgcccagcggccccaaacaagtgaaactggaaaagatgatcggcggcaacgcggttcaggcacacaccatcggggccttcagccgagaggccttcgacggtctcgttatcgtagaaagatgcattagggtcatggtgcaacaggctgagcacgttgcgttcgcgcttctcagaggctaacgcatggaggaagcgctccatttcgagcacatcctctactacatagccataccgacccagataaaacacgccgtgcagctgcttggcgttcttgaagatttcacagcggaactcttcgtccattccctggcctgccatctgttctctatgggaacagactatgccagccttttggcatcagcgacaacggcctccagctccgcgaggcgctgctccagaattttcagacgtttcttttcctcagcagcaagctgtatttctcgctgctcaccctcgtccagttcgcgccagagtgccagcagggcctgctcgcggggatcggtaggcgttgcctcaaccttctgcgggtctgcccctctccacattggtccttcaccggtgagcaaccaatccagtctgacgcctctctcctccgctgcacttacgcaaattgtgtaaggcacggagtcacgtgagcgccagttgccaagcgttgatcgcttgatctgcagaagctcactcagctgattgtcgttcttgaccccgtaaacactcaggaggcgatccacgacggcgttagcgctcttgtttcccaaaataggaaattcctgttgacttactcaaaatgaggcaatagccttactcacaacgagaacatcttatccgtatgggaacacccaagccatgacccctaatcagatccgtgcacgtctcgtcgaaaagggcagcagctaccgaaagttcgcgctggctcgcggctacgagccgcgcaatgtcacccaagtggtggctcgctgggcaggagcggaacgtttgcccaacggtcgcctcgcctacgcgattctgaaggacctatctgaagagataggtgccgatgtcgtccccggcattcgccagcccgcaaccgaacagtaatgaccaccgccctggggagacaccagaagatgaaacgcccgctcctagaaacgcggcgccaggtggtcagcgcgatcatcggcgcctaccccggcggtcgcgaatgcgccgctgcccgcctgggcctcgacctgaagaagttcgacaaccacgcctacgagaacgccggcagcaagccgctcagcgacgaccagttgctcttgctcgagcaggaaaccggcaccagccacttccccgagtacgtcgcacacctgtatggcggcatgtttgtgcagatgcccgacccggcccagctggataatcttgatctgtacgcccggggcgtcgccaccgccatcaggcgcggcgaggtcgaccgcatcatcgccgaggcgctacgcgacggagagatcgacgaggccgaactcgccgaaatcatcgtcgcccaccgccaacacctggccgcacgacatgccgaagtcggcgcagtgatcaccctgcaccggagggtcaaggcgtgagcgtctacaagctcgtctgcccctgctgccacagccggatgcggatccgctcctccgagggccaaaccccgtgcttccgctcgatgtacgcgcaatgcacaaacgcgctctgcggcgccaccttcaccggctccctgagctgggactaccagctcagcccctcgggcctcgagcggccactgctggtactccccatggcgccttcgaaaacccgtcaactggcacgccgcgacctcgcggccgcaaccaaccaactggacctgctggatcatgtggagtgcatgcaatgaacggcaccaacgactaccgcagcaccatgcagcaagccgccgcagcgtacctgctggccaacgccaaccagtatctgtcctccggctccgaccggttgttcgatgcctgtgtcaaccatctggccaaaggcctcgaggttccccagttcatggccgaacaactcgcccagcgcgcgtgggatgaagtcttcgcggggccagaccctatctggctgggtatcgactggggacagggagacgacgaggtggtctacctaatcgacacccgcagtcactgtcgcttcccgatcccggcccgctatctgcccgcgcacctgctcaaacagcgcccccagcacacccagtaatccctgaaacacgccctacccactgccgtgggtttggggaagttacgcccagaattcgaggtatcaccgccatgagcggccacatttcaatcaccgtcgaagtcgaccagaaccaggctgagaagtacctgctctggctggtcagccagtacgaagccgccatggccgagtgctggtacgacgatcgctaccgctatacgccgcagggcctgcgcggcaagcgcatcctcgaggaccgcccacacattgccggcatctgccggaccatccgcgaactgcgcaagcagattcgggggcgcgcatgaaggaaatggaccgcgaactcaaggccgacgtgctgcgccgcctgcaggatcagtacggactgacgccgatcaagggcacaaagtacatgcgcaagggcgagtgcccgacgtgcggcaaaaaggagctctacaccctggtcgacagcccctggttcatccgctgcgggcgcggcaagtgcggcgacacctggcacatcaaggaaatctacccggagctcttcgacgactggagcaagcgagcgccggccaccgacaaggaacccgccgcctcggcccgggcgtacctggcccatgcccgcggcttcgacctgacgctgatcgatggctggtacagccaggaaaactactgggaccgtgaccttgagatcggtagcgccacagtccgtttcccattgaagaaagggggctactgggaacgcctgatcgatcgcccgagccgcttcggcaagaagaaggcccgcttcaagccgggcgacagcccgcgcggcgtctggtggtgcccacccagcgtcgacctgcaggaggtgaaggagctgtggatcgtcgaaggtatcttcgacgccatcgcgctgctgcaccacggcatcgacgccgtgtcggccatgagctccaacgccttccccgagcagtctttgcgcgaactcgcgatagcccgtggcggcaagctgccgaaactgatctgggcgctggacaacgaacctggtgcccacaagtacacccggcgctgggtgaccgaggcgcgtgccctgggctacgtctgcgaagcggcccaactaccgcagcgcaacaaccgcaaattcgactggaacgacctgcaccagcgctggatgttcatcgatgacgcgaccgagcgcgccgcgcagatcgagaaggacctcaagaccgcgcgtcatgagggcgcgctgctgatcgccgagagtgccgccgagaaggccctgctgatgtacgactggggcaagcgcggtgaattccacttccgcttcgccaaccgcctctactggttcaagctggatatcgagaagttcaacaaggccatgcagagcctggaggacagcgacaaccacgacgaccaattgctgaaccagaaacagatgcgcgacaaggccctgcagcaagccggcggcgtcgtggaaatcgccaactgcttcccccaggccctgtacttccagcgcaacgaggtcacagacgagagctggtactacttccgcatcgatcgccccgacgacgagagcgtgaagaacaccttcaccagcgcccaagtcgcggcggccagcgagttcaagaagcgcctgctcggcgtggcagcgggggcgatcttcaccggcagcggcgcgcagctcgaccagatcatgaagctgcaactcaccggcctgaagacggtggccaccatcgattacctgggctacagccgggagcatgcctgctacgtcctgggcgacgtggcggtgcgcggcggcgtgatcgagaaggccaacgccgaagacttcttcgaattccaaaagctgcgcctgaagaccctgcagcgttcgatcaagctgcagatcgccaccgacgccaaggactaccgcccggagtggctggactggctgtggacctgcttcggcgccaagggcctggtggcgctggcattctggttcggctcgctgttcgcggagcagatccgcgccgagttccagtcctttccgttcctcgaggccaccggcgaggccggtgccggcaagtccacgctgatcaccttcctgtggaagctgctcggccgggcggacgaggaaggccaggacccgtcgaagatgaccaaggcgggcctgcgccgctggctgacccaactgtcgaacatgcccatggtcatgctcgaggccgaccgcagcgacaacagccgcgccggcggcgccgccaagtccttcgactgggacgagttcaagccgctgttcaacggccgcgcgttgggcgtgaccggccagaagaccgccggcaacgagacctacgagccccccttccgcggcaccctggtgatgagccagaacgccacggtgcaggcctccgaagcgatcatgacccgtatcgtgaagctgcacttcattcgcccagagatcacccgcgagagccaggccgcggccgacaacctcaaccacctgggcgtgcttgaggtcagccacttcctgctgatggccatccgcgccgaggcccgcgtgctggagtgcttccgcgagcggctgaaggttcacagcgcgacgctgcgcggtctgaagcagattcgtatcgagcggctgatcctcaaccacgcgcagatgatggccctggtcgacgcgctgcgcctggtggtgccgctgtccgagcaccagctcgcctgcgctcagcagaccctgatgacgatggccctggagcgccaggacgccgtcaacgccgacgcacccgaggtggccgagttctgggaggtctacgactacctcgaaaacctcagcgaagagccggtgctcaaccacagcaagaaccccggaaccatcgccatcaacctcaacgagttcgtgaagctcgccgccgaccaccgccagaaggtggccgacgcggcaaccctgcgcgacctgctgaaagaatcccgcaggcacaaattcatcgaatacaaggccgtcgacagcgcagtgcgcacggcacacgcccgccagaaccctttcaccaaccgacccagcaccgtcaagtgctggattttccaagcctgaccggcgcggcaacgccggaaccacaatccgataggagagacaccatgcaacccctcccccacgactatctgcaactgatccacgacttccagaccaggcagcaggagaacgaggtagccggcctcaccgcgctgaaacgcctgctgccgatcgcccagcgcgacagcggccagagcggcgtgatcggtcggttcctgctcggcctgtacaacggccaagcccaccgcttcgacctcaccgagctgcgcagcctagacccagcgctgttcgatgcgtgcctgtccgtgctgcgcatggactacgccccgaaacaggaagtgcatgagtacttcgaaaacggcgatgcgatctggcaggacctgagcaagcgctgggccgcagcgaagcttgcagcataaggaggctgactgtggatgtgatcgaccaagccaacgaacgagccgagaacatggtccaggccgccctggcccagcggacaaacacccgcctggcgcccagcgccctctggtgcgaggactgcggagagcagatacccgaggcccgccgccaggctgctccgggctgcgagtgctgcatcagttgccaggaactgcgcgagcaccccgcgcggcgctgaagaagaggcgccagggagcggcaactccctggcgccaaccaccccaaaggagagacaccatgcaagcgaatcagcctcaaggcggcggcgccaaggctagcacaaccacgtcggcggctcgcactcgcccagcgatggccagcaagcggctggaccttccgagcatctgtgatatctgcggcaacgcacgttccaccggcaaacaccaacgctgcagccgaattcgccaacaggccaaggctgtcgagtgggccagctacatggccaacctggcggccaggaaaacgcagggagggcggcggcatgcttaagcgtaccctctaccacttccacttctgctgcggcctaggcggcggcgccaagggcttcaatagggcacgcccgcgcgtgggcaacgtcgaagctcagtgggaatgcctgggcggcatcgacgtcgaccctgccggcctggctgacttctcacgcctggccggcgtgcctggcaccctgctcgatctgttcacccgcgaccagtacatcgactttcacggaaaggaaccgccgcctggctggcgtgaggccacccccgaggatgtgcgccgcgccgcccagggcaagcgcccggacgcggtgttcatctccagcccctgcaagggggcctccggcctgctgtccgagaagttgagcctcaccccgaaataccaggcactcaacgaattgactctgcgctgcatctggctgatgggcgaggcctggaaggacgacccggtgccgctgatcgtcttcgagaacgtgccgcgcctggcaactcgcggccgccacctgctggaccagatcaacagcctgctcagccactacggctacgccgtggccgagaccactcacgactgcggcgagctgggaggcctggcccagtcgcgcaagcgcttcctgctggtcgcccgccacgtcgagaaggtgccgccgttcctgtacgagccagagaagaagagcctgcgcgccgtgggcgacatcctcggtcgcatgccgctgcccggcgacatcgaagccgcgggcccgatgcaccgcgttccgtcgctgcagtggaagacctgggtacgtctggccttggtgcgcgctggcagcgattggcgcagcctgaacgacctcgccgtcgaggatggacacctgcgcgacctagtgatcgtgccggagtgccggtccggctacatgggcgtgcatgggtgggacgacaccgccggcaccatcgccggccgctccggccccaccaatggagcgttctcggtcgccgacccgcgctaccgccaggcttcgaactggaaccacggccagcagttcggcgtgatccgctgggccgagtcgtcgccgacgatccccggacagaccatgccgggccaaggcaccttcagcgtcgccgacccgcgccccaactggaaccgccacagcggcaactatcgggtgatccgctacgaccaacctgccggcacgatcatcgccggcggcaagggcgtccagggcggccagcagtcggtggcagacccgcgcatcctgcaccgcggcaagggcgacaactacctgaccggcggccactacggggtgatcggcttcaaccagccttccggcgccatcgcggccagctcccgctacgacagcggccgattcagcgtcgctgacccacgcatcccatcagcggacgaacgcctgacctgcattatccgcagcctcgacggcacctggcaccgccccttcaccacgctggaaaaggcagccctacagagcctggtcgagcccgaggaatacctggtgctcgacggcatgagcgacaaggactggagcgagcgcatcggcaacgccgtgccgccacacgcagctgaggccatcgccgatgtcatggccaccaccctgctgctggccgagcagggcgagaccttcaggctcagcaacaccccaatctgggtgcgcaacgtggcggtggcgttgagcgtttcacaacccgctgaaagtcgctgaggtgaacggcatgcacgaattattgaagatgctggacaacccgcgcagcttgctgaacttctcgctggcgattctggctgtcctggcggtgttcttcatgttgaagagcggcgcgcaagccgattcgaggcccgttatcgatacccagaaaacaggggccatcattctagtcagtcccgagggagacagggcggtatgatcaagcagcccccggccacaatcctgactttcgaggatctgcagcagctaaccggatacaccaagcgctctggtgtagagcgggcactgcgtaaacagggaatccgttggttctggggccgtcacggcccctggaccaccattgaaatggtcaatcaggcaggcgggcaagcagcggacgacgagcagtacgacagcagaatcctatgaggcgatcccgcaagcggaagcataatccgcacatacctcagcacatcgaccaggccgccattccggcggccgttttcttcgatcatcgcggcaacggtgtgtggtacacgctgcattatgatgaaggaggtcgccagcggcggacgaaccttgcaccctcctacgtgaccctctccgagctccaccgcatcatggaggaacgggaagggatcgatcgagacagcctggcgaacctgtgcggcgagttccataagagcactcagttcaagcggctgaaacccaagacccagagtgactacgagtactgccgagaagtcctgctggccatcccaacgcggctgaagaagccgctcggcgagctggcagttcgaaaattctcccctgccctagtgcagcgcctggtcgaccgcattgccgaagaaggcaccccctcgaaagcagcccatgtgctgcgctacttgcgacgagtgatgcagtggggccgcaaccgaggctaccttcaaatcaacgtcgcccaaggcatcgaagcacctgtagaacgaaagcagcgtcgccttcctgccccgacggtgatgtaccgcctgatcgatcgggcgcgtgagttgggcaagctcaagcgagggcaaccgggcgcatgccccgcgtacctaagcagcgtcatggagctggcctacctatgtcgcctgcgcggtatcgagacagtcaccctcagcgacgccaacgaactccccgagggcgtacttacgaatcgcagaaagggaagtcgcaacaacgtcgtgcgctggacacctcgcctgcgggctgcgtgggaccatgcgaaggcctaccgcgctcaggtatggacctcgaagtccctaccaacccccacggcaccagagctgcgaccgatcatcgtggcatcgcacggcggctcactgcagaagtcgagcctagactcggcctggcagcggttcatcaccgcagccctcgaagcaggcatcatcactcccgaccagcgcttcggcctgcacgatctcaagcggcgcggcattaccgacactcccggcaccagggccgataagcaagaagccagtggccaccgcgacgagtcgatgcttgatgtctacgatctgagcgtgcctatcgtgtccccttccgccgactgacttccttgcgtaacaagcaagccaggagccgcatggttcctgggttttgctcgtgcccttacgtaacaagcctcgacgtaacttactgatttcaaagcagtgcctagctttcttgtaatcagtaggtcccgggttcgactcctggtgccggcaccatgaatcccgaaaagccccgcctcgcgcggggctttttgttttatcctgcttcctttctacccagtgatggcacttcgaatagaatgccgggtcagatgcacctaccagatctggggttggcaggatcgccatttttcccgtactaatcgtcgtcttcacgatcgattggtacaccttggcgggacgtgtcgaagcagccctacggacaaccactgcttgaacaaggtatgactcatgacgattctcgtgaccggcagcgccggcttcatcggcgccaatttcgtgctcgactggctggccctgcatgacgagccggtggtcagcctcgacaagctcacctacgccggcaaccggcagaacctcgccagcctcgacggcgacgcccggcacaccttcgtcgccggcgatatcggcgatagccagctggtagcccgcctgctcgccgatcaccagccgcgggcgatcctcaacttcgccgcggaatcccatgtggaccgctcgatccacggccccgaggacttcatccagaccaacatcgtcggcaccttccgcctgctggaagaagtgcgcgcctactggggcgcgctggagccggaagcgaaggcggcattccgcttcctccatgtctccaccgacgaagtctatggctcgctggcaccgagcgatccggccttcaccgagaacaaccgctacgagccgaacagtccctactcggcgtccaaggcggcctccgaccacctggtgcgggcctatcaccacacctacgggctgccggtgctgaccaccaactgctcgaacaactacggcccgtaccacttcccggaaaagctcatcccactggtgatccacaacgccctggccggcaagccgctgccgatctacggcgacggccagcagatccgcgactggctctacgtcaaggaccattgcagcgccatccgccgggtcctcgaagccgggcaactgggcgagacctacaatgtcggcggctggaacgaaaaggccaacctcgacgtggtcgagaccctctgcgccatcctcgaccaggagcagccgcgcgccgacggccgcagctatcgcgagcagatcaccttcgtcaaggatcgtccgggccatgatcgccgctacgccatcgatgccacgcgcctggagcgcgagctgggctggaagccggcggaaaccttcgagaccggcatccgcaagaccgtgcgctggtacctggacaaccaggactgggtggccaacgtaaccagcggtgcctaccgcgagtgggtgggtaagcagtacgcatgaaccggatccttctcctcggcgccaacggccaggtcggctgggagctgcagcgcgccctggcgccgctgggcgaactgctggtctgtgaccgtcggcgcgccgatctcgccgaccccgaaggcctggcgcgactggttcgcgccgagcggccgcagttcatcgtcaacgccggtgcctacaccgcggtggacaaggccgagagcgatgccgacaacgcccgcctgatcaatgcccgcgccgtcgcggtactggccgaggaggccgcggcctgcggcgcctggctggtgcattactccaccgactacgtgttcgacggcgcgggcagcgtgcctttcgccgaggacgcgccgaccggcccgctgagcgtctacgggcagaccaagctggaaggcgagcaggccatccgcgccagcggctgccgccacctgatcttccgcaccagctgggtctacgccgcgcgcggcggaaacttcgccaagaccatgctgcgcctggccgggcaacgcgacgaactcaaggtcgtggccgaccagttcggcgcgcccaccagcgccgagctgatcgccgacgtcaccgcccaggccctgcagcgcctgcgctgggatgtcgagctggcagcacgggccagcggcacctaccacctggtcgccagcggcgagacgtcctggcacctctatgcgcgcttcgtcatcgaacaggcgctggagcggggctgggagttgcaggcgacgccgcagcgggtcctgccgatcgccaccgaggactacccggtgccggcgaagcgtccggccaattcgcgcctcgacaaccgcaagctgcaacaggtcttcggcctggtaatgccagactggcgctaccatgccggacgcatgatccaggaactgagcgagcagggaccactatgaaacgcaagggcatcatcctcgccggaggctcgggcacccgcctgcacccggcaacgctggccatctccaagcagttgctgccggtgtacgacaagccgatgatctactacccgctcagtaccctgatgctggcgggcatccgcgagatactgatcatctcgaccccacaggacaccccacgcttccagcagttgctgggcgacggttcgaactggggcctggacctgcaatatgccgtgcaaccgtcgccggacggcctggcccaggccttcctgatcggcgagtcgttcatcggcaacgacctcagcgcgctggtcctgggcgacaacctttattacggccacgacttccacgagttgctcggcagcgcttcgcagcgccagaccggcgccagtgtcttcgcctaccacgtgctggacccggagcgctacggcgtggtcgagttcgaccagggcggcaaggccatcagcctggaagagaagccactggagccgaagtcgaactacgcggtcaccggcctgtatttctacgaccagcaggtggtggacatcgccagggacctgaagccttcgccgcgcggcgagctggagatcaccgacgtcaaccgcgcctacctggagcgcggccagctcagcgtggagatcatgggccgcggctacgcctggctggataccggcacccacgattcgctgctcgaggccggccagttcatcgccaccctggagaaccgccagggtctcaaggtggcctgcccggaagagatcgcctaccggcagaagtggatcgacgccgcgcaactggaaaaactcgccgcgccgctggccaagaacggctacggccaatacctcaagcgcctgctgaccgagaccgtgtactgatgaaagcgacccgcctggcaattcccgacgtcatcctcttcgaaccccgggtgttcggcgacgatcgcggattcttcttcgaaagctacaaccagcgtgccttcgaggaagcctgcggtcatccggtcagcttcgtccaggacaaccattcgcgttccgcccgtggcgtcctccgcggcctgcactaccagatccggcaagcccagggaaaactggtgcgcgccactctcggcgaggtattcgacgtggccgtcgacctgcgtcgcggctcgccgaccttcggccagtgggtaggcgaacgcctgagcgcggagaacaagcgccagatgtggattccggccggcttcgcgcacggcttcgtggtgctcagcgaatacgccgagttcctctacaagaccaccgacttctgggcgccggaacacgaacgctgcatcgtctggaacgatcccgagctgaagatcgactggccgctgcaggatgcccccctgctttcggagaaggaccgccagggcaaggcattcgccgacgccgactgcttcccctgaacggcagggagcgaccggactcggcgcaaggcgtgataatttagggcatcccgtccgggatgccccggatactcgcagccacggcaggttcgttcgtcttgaaagcctatttccatcgctggcgctcgctggtcatcctcgccctgcttctcgcgccgctgctctggcccctgcaatatttcgccgagcgctactacagcgagcagttggccgagcagaaccgccagacgctcgacctctacgtcgccaacctgctcggcacgctgcgccgctacgaagaactgccgcagatcctcggcggtctgccggtgctgcgccaggccctgcaacaacctggcgacccgctgctgcagaagatcgccaacgaggcgctggccgacatccgccgacgcaccggcgccgacgtgatctacctgctgcaaccggacggcaccacccaggtcgcctccaactgggcccaggcggacagtttcgtccaccgcaacttcgccttccgcccctattatcgcgaggccatgcagggccgcctggcgcgcttcttcggcctgggcaccacctcgatcaagcgcggctactacttcgccagtgcggtgaaggaaggctcgcggatcatcggcgtgctggtggtgaaggtcgatctcgaacacatcgaacggctctggggcaattccccggagcaactgctggtgatagacaactacggcgtggtgatcctctcctcccgcgaggattggcgcttccatgccagtcggccgctgagcgcggcggagcgcgacgagatccacgccaacatcccctacccggtgcaggacccgaagcccctgcgcctgcaacagagcgcctggctcagccagagccggacgctaccggaaaccggctggacggtgagcatctacgccccccgcaccctcatcgaacggccggtgcgcagcgtcctgctgatcggcggcgcgaccctgctcgccctgctcctgctgcttaccctgctgaccctcagccgccgtcactacctggaccgcatcgctctcgaggccgaggccaagcgccagttggaagagcgcgtactggaacgcacccgcgagctggagaacgccaacgcgcagttgcagcaggaagtccacgaacgcgagcaggcccagcgcgagctgatgcgcgcccaggacgaagtggtccaggccggcaagctcacggccctcggcaccatgtcggcgagcatcagccacgaactcaaccagccgctggcggcgatccgcagctacgccgacaacgcccgggtgctgctcgaccaccagcgcaccgaggacgcccgcggcaatctcgagcagatcagcgacctcaccacccgcatggcctcgatcatcgcccacctcaaggcctatgcccgcggtgcgcgccgggcgccggagaacgtgcagttgcagccggcgatcgaggacgccctgtcgatggtggccagccggcggcgggcgatgaacgtcgaactgctgcgcgacgtgccggacgccccgctgtgggtccaggccggcgagacccgcttgcggcagatcctcggcaacctgctcaccaatgccctcgacgcgctcgccgagaaagctccgccgcggcgcctgtgggtaatcgccagccaggaccagcacggcgtgaccctgactctgcgcgacaacggcccggggttttccgaggacgccctggcccacgcccacgaaccctttttcaccaccaagaccaccgccaaagggctcggcctcggcctggccatctgcgataacctattgcgcgccctcggcggccgcctggaaatgggcaaccatctcgaaggcggcgccgtggtgcgcctgcacttgctgccgggagttcccggcgtcgccgccatgccccaggaggaaacccgcgcatgagtcccttcgcgccattcgatgcccagacccaggtcctgctgatcgacgacgatccgcacctgcgccaggccctgcgccagacgctcgacctcgccgggctcaaggtcgcgaccctggacgacgcgcgccagctggataccgcgcagtgcaaggactggcccggggtggtggtcagcgacatccgcatgcccggcatcgatggcatggaactgctccgccaattgcacgaacaggacgccgacctgccggtgatcctgatcaccggccacggcgacgtgccgctggcggtccaggccatgcgcggcggcgcctacgacttcctggaaaagccctttcccagcgacgccctgctcgacagcgtgcgccgcgccctggaggtgcgccggctggtcctggagaaccgcaccctgcgcctggccctggccgaacgccacgaactgcatgggcgcctgatcggacgctcggccggcatgcagcgcctgcgcgagcaggtcggctcgctggcggcgatccaggccgacgtgctggtccttggcgaaaccggcgccggcaaggaggtggtcgcgcgggccctgcatgacctgtcgagcagacgcgacggaccgttcgtcgcgatcaacgccggcgccctcgccgaatcggtggtggaaagcgaactgttcggtcacgaggccggcgccttcaccggcgcgcagaagcgccgcatcggcaagttcgagtacgccaatggcggcaccctgttcctcgacgagatcgagagcatgagcctggacgtgcaggtcaagctgttgcgcctgctgcaggaacgggtagtcgagcggctcggctccaaccagttgatcccgctggatatccgcatcatcgcggcaaccaaggaagacctgcgccaggccgccgaccagggccgcttccgcgccgacctctattaccgcctcaacgtcgccagcctgcgcattccaccgctgcgcgagcgcggcgaagacatcccgctgctgttccgccatttcgccgaagccggcgccatgcgtcatggcctgacgccacgcgaactggacgccggccagtcggcgcggctgctggcctacgactggccgggcaacgtgcgcgaattgcagaacgccgccgagcgcttcgccctgggtctcggcctgagcctggacgacggagtcctgcccgacgccgccgacgagccgcacaacctcagcgccaaggtcgaggccttcgagcgctcgctgatcgccgccgagctggaacgcccgcacaattcgctgcgcagcgtcgccgaggccctcggtatcccgcgcaagaccctgcacgacaagctgcgcaagcacggcctgccgttcaacacgcctggcgaaaatccgccagatgatggcgaatgaatggcggattaccgccaaccgttcgccatccgcgcccgcagcatctcccctgcgtacccttgcccgactggcacagggcttgctcacggcttcccgagcgttccaacaagcagaagaccaggcgcttttccgattcacgcagcatctgccgctgcgctgcctagacttcccttgttcggccacgccgagaggacacccgtcctcttcataaaagacagacaagaacaaagaggaagtctcatgctcaagcacaccgcgaaggcgctcgtctgcgcactttccctgaccgtcgccggaatcgtccaggcagccgacccgatcgtcatcaagttctcccacgtcgtcgccgagcacacgcccaagggccagggcgcgctgctgttcaagaaactggtggaggaacgcctgccgggcaaggtcaaggtggaggtctacccgaactcgtcgctgttcggcgacggcaaggagatggaagccctgctgctgggcgacgtgcagatcatcgcgccgtcgctggccaagttcgagcagtacaccaagaaattgcagatcttcgacctgccgttcctgttcgacaacatccaggcggtcgaccgcttccagcagagcccgcagggcaaggagctgctgacctcgatgcaggacaagggcatcactggcctcggctactggcacaacgggatgaagcagttgtccgccaacaagcccctgcgcgagccgaaggacgcccgcggcctgaagttccgcgtgcaggcctccaaggtgctcgaggaacagttcaaggcggtgcgcgccaacccgcgcaagatgagcttcgccgaggtctatcagggcctgcagaccggcgtggtcaacggtaccgagaacccctggtcgaacatctactcgcagaagatgcacgaagtgcagaagtacatcaccgagtccgaccacggcgtgctggactacatggtgatcaccaacaccaagttctggaacggcctgccggaagacgtgcgcggcgtgctggccaagaccatggacgaggtcaccgtggaggtgaacaagcaggccgaggcgctcaaccagggcgacaagcagcgcatcgtcgaggccaagaccagcgagatcatcgaactcactcccgaacagcgggccgaatggcgcaaggccatgcagccggtgtggaagaagttcgaaggcgagatcggcgccgacctgatcaaggccgccgaagccgccaaccaggcccaataagaagaagagggaaagcccatgcacgcgctcgcgcgcgtctgggcgcgcctggaggaaggcctgatcgccttcctcctcgccgccatgacgctggttaccttcgtttatgtagtcctcaataacctctatacgctgctctacgatctcgccgatctctgggagggcggcaacgagacgctgctcgccatcggcgatggggtcctcaccctggcccaggagatgacctggagcaacgccctgaccaaggccctgttcgcctggctgatcttcctcggcatcgcctacggcgtacgcaccgccgggcacctcggtgtggacgtgctggtgaagctggcctcgcgaccggtacagcgagtgctcggcgtgatcgcctgcctggcctgcctcggctacgccggcctgctctgcgtggccagctacgactgggtgaagaccctgttcatcgccggcatcggcgccgaggacctcgaccacttcggcatccgccaatggcacatcggcctgatcgtgccggtcggcttcgccctggtgttcatccgtttcgccgagatcctcgtgcgcatcctgcgcaaccgccagaccggactgggactggccgacgaggccgccgacgcgctgaagctgaccgagcacgaggagcccaaggcatgaccattctgttcctcttcctgctgctcttcctgctgatgttcatcggcgtgccgatcgccgtctccctgggtctctccggcgcactgacgatcctcctgttcagcccggactcggtacgctcgctggcgatcaagctgttcgagacctccgagcactacaccctgctggcgatcccgttcttcctgctctccggcgcgttcatgaccaccggtggcgtggcgcggcgcctgatcgacttcgccaacgcctgcgtcggacacatccgtggcggcctggcgatcgccgcggtgctcgcctgcatgctctttgccgcgctatccggctcgtctccggcaacggtggcggcagtgggttcgatcgccatcgccggcatggtccgctcgggttatccacaggcgttcggcgccgggatcgtctgcaacgccggaaccctcggcatcctcatcccgccatcgatcgtgatggtggtctacgccgccgccaccgagacctcggtgggcaagctgttcatcgccggcgtggttccggggctgctgctgggactgatcctgatggtggtgatctacatcgtcgcccgggtcaagaagctgcccgccatgccaagggtcagtctgcgcgaatggctggccagcgcgcgcaaggcgctgtgggggctgctgctgatggtgatcatcctcggcggcatctattccggcgccttcacccccaccgaggccgccgccgtcgccgcggtgtactcggccttcgtcgcactgttcgtctaccgcgacatgcgcctgagcgaatgcccgaaggtgctgctggagtccggcaagctgaccatcatgctgatgttcatcatcgccaacgccatgctcttcgcccacgtgctgaccaccgagcagataccgcagagcatcgccagctgggtcacggaactgggactttcgccatggatgttcctgctggtggtgaacatcgtgctgctgatcgccggcaacttcatggagccttcggcgatcatcctgatcctggcgccgatcttcttccccatcgccatggagctgggcatcgatccgatccacctcggcatcatcatggtggtgaacatggagatcggcctgatcacgccgccggtcgggctcaacctgttcgtcacctcggcggtcaccggcatgccgctgggcgcgaccatccgcgcagcgctgccgtggctgatgatcctgctggtgttcctgatcatcgtgacctacatcccggcggtatccctggcattgccgaactggctggggatgagctgacggaacggtaacgacggcggaaaaccccgccctgcgctcgggccttcggcaaaaatccgctcatgccgcaggcccgtgccccgcagttgacgggccgggccacctgtcgatggctggcacgccgcttgctcaatcgctcgcagtgcccctggcaccggctttcggttcgcccagcgaaccgcgcccttcggccacgaaccggatggcggccccttcccctgtgccgacgtgcgccagcacgcgcggcgggtgggcggcgatcccgtccccccagcggtcttcataccctgaagcccaaatgaagagcccggcgaacgccgggcttcttcatttctttccttgtgctttttcgttctttgataagagcggaaaattatttttacttataaataaaaaatactcctctcgaaatactgcaacacttccctggaaagtcgcggcggtttttcgacggaccgtcaacaagccggcgaccacccacctgaaagtcagaataccgtctcgcgaaattcattgatcggcatcaacgatccggcttgatccgcggcttatagcccgatttcgagcaatttcaagctttccccgtagcggatggcaagtcttcccctaacacatgaaaaaaccgccctattccgggcaggtcttagattcctcttctatctttggcacccgcgacttacaggaatgcgtcatctaattactttgagtaggaagctattgacgtggatcagcattcaacaatagccgctgccgcctaatgtcttcactctcaattcctatagggagattccgaaaatgtcccaagaatccagccaaaaactccgactaggagcgctaacggctctggttgtcggctcgatgatcggagggggcatcttctccctcccgcaaaacatggcagccagcgccgatgtcggcgccgtcctgatcggatgggcgatcaccgccgtcggcatgctcaccctcgctttcgtcttccagaccctcgccaaccgcaagcccgaactcgacggcggcgtgtacgcctacgccaaggccggcttcggcgactacatgggtttctcctcggcctggggctactggatcagcgcctggctgggcaacgtcggctacttcgtcctgttgttcagcaccctcggctacttcttcccgatcttcggcaagggcgacaccgtcgcggcgatcgtctgcgcctcggtcctgctctgggccctgcacttcctggtgctgcgcgggatcaaggaggcggcgttcatcaacaccgtcaccaccgtggccaaggtcgtgccgctgttcctgttcatcctgatctgcctgttcgccttcaagctggacatcttcaccgccgacatctggggcaagagcaacccggacctgggcagcgtgatgaaccaggtgcgcaacatgatgctggtcaccgtctgggtgttcatcggcatcgagggcgcgagcatcttctcctcccgcgcggaaaaacgttccgacgtcggcaaggccaccgtgatcggcttcatcaccgtcctgctcctgctggtgctggtcaacgtgctgtccatgggcgtgatgacccagccggaactggccaagctgcagaacccgtcgatggcgctggtactcgagcatgtggtcggccactggggcgccgtgctgatcagcgtcggcctgctgatctcgctgctgggcgcgctgctctcctgggtgctgctgtgcgccgagatcatgttcgccgccgccaaggaccacaccatgccggagttcctgcgccgcgagaacgccaaccaggtgccggccaacgccctgtggctgaccaacatctgcgtacaggtgttcctggtggtggtgttcttcacctcgggcgacccggacggcatggacccgtacaccaagatgctgctcctggccacctcgatgatcctgatcccgtacttctggtccgccgcctatggcctgctgctgaccctgaagggcgagacctacgagaacgatgcccgcgaacgcagcaaggacctggtcatcgccggcatcgccgtggcctacgcggtctggctgctctacgccgggggcctgaagtacctgctgctgtccgccctgctgtatgcgcccggcgcgatccttttcgccaaggccaagcacgaggtcggccagccgatcttcaccggaatcgaaaaactgatcttcgccgcagtcgtcattggcgccctggtggctgcctacggcctctacgacggtttcctcaccctctgattactccactggagacgtgaaatgagcacggaaaaaaccaaacttggcgtccactccgaagccggcaaactgcgcaaagtgatggtctgctcgcccggactcgcccaccagcgcctgaccccgagcaactgcgacgagttgctgttcgacgacgtgatctgggtgaaccaggccaagcgcgaccacttcgacttcgtcaccaagatgcgcgagcgcggcatcgacgtcctcgagatgcacaatctgctgaccgagaccatccagaacccggaagcgctgaagtggatcctcgatcgcaagatcaccgccgacagcgtcggcctgggcctgaccagcgagctgcgctcctggctggagagcctggagccgcgcaagctggccgagtacctgatcggcggcgtcgccgctgacgacctgcccgccagcgaaggcgccgacatcctcaagatgtaccgcgagtacctgggccattccagcttcctgctgccgccgttgccgaacacccagttcacccgtgacaccacgtgctggatctacggcggcgtgaccctgaacccgatgtactggccggcgcgacgacaggaaaccctgctgaccaccgccatctacaagttccatcccgagttcgccaacgccgaattcgagatctggtacggcgacccggacaaggaccacggctcctcgaccctggaaggcggcgacgtgatgccgatcggcaacggcgtggtcctgatcggcatgggcgagcgctcctcgcgccaggccatcggtcaggtcgcccagtcgctgttcgccaagggcgccgccgagcgggtgatcgtcgccggcctgccgaagtcccgcgccgcgatgcacctggacaccgtgttcagcttctgcgaccgcgacctggtcacggtcttcccggaagtggtcaaggaaatcgtgcccttcagcctgcgccccgatccgagcagcccctacggcatgaacatccgccgcgaggagaaaaccttcctcgaagtggtcgccgaatccctcggcctgaagaaactgcgcgtggtcgagaccggcggcaacagcttcgccgccgagcgcgagcaatgggacgacggtaacaacgtggtctgcctggagccgggcgtggtggtcggctacgaccgcaacacctacaccaacaccctgctgcgcaaggccggcgtcgaggtcatcaccatcagcgccagcgaactgggtcgcggtcgcggcggcggccactgcatgacctgcccgatcatccgcgacccgatcgactactgacagacaacccgctctcgagctgaacggcggcgttcccaggaggggcgccgcccaccgacttcccacaaggagatcaatcatggctttcaacatgcacaaccgtaacctgctcagcctgatgcaccacagcacccgcgagctgcgttacctgctcgacctgtcccgcgacctcaagcgcgccaagtacaccggcaccgagcagcagcacctgaagcgcaagaacatcgccctgatcttcgagaaaacctccactcgcacccgctgcgccttcgaggtggccgcctacgaccagggcgccaacgtcacctacatcgacccgaactcctcgcagatcggccacaaggagagcatgaaggacaccgcgcgggttctcggccggatgtacgacgccatcgagtaccgcggcttcaagcaggaaatcgtcgaggaactcgcgaagttcgccggcgttccggtgttcaacggcctgaccgacgaataccacccgacccagatgctcgccgacgtgctgaccatgcgcgagcacagcgacaagccgctgcacgacatcagctacgcctacctgggcgacgcgcgcaacaacatgggtaactccctgctgctgatcggcgccaagctcggcatggacgtacgcatcgccgcgccgaaggcgctctggccgcacgacgagttcgtcgcccagtgcaagaagttcgccgaggaaagcggcgccaagctgaccctcaccgaggatccgaaggaagccgtgaaaggcgtggacttcgtccacaccgacgtctgggtgtcgatgggcgagccggtggaagcctggggcgagcggatcaaggaactgctgccctaccaggtcaacatggagatcatgaaggccaccggcaacccgcgggccaagttcatgcactgcctgccggcgttccacaacagcgagaccaaggtcggcaagcagatcgccgagcagtatccgaaccttgccaacggcatcgaggtgaccgaggacgtcttcgagtcgccctacaacatcgccttcgagcaggccgagaaccgcatgcataccatcaaggcgatcctcgtctcgaccctcgccgacatctgaccgcgctcctgcgccccggcccacgcggccgggcgcagccgccttccggaggtaaccgatatgcgtatcgtcgtcgcattgggcggtaatgccctgctacgccgtggcgaacccatgaccgcggacaaccagcgggaaaacgtgcggatcgccgccgaacagatcgccaaggtggcgcccggcaacgagctggtgatcgcccacggcaacggcccccaggtcggcctgctggccctccagggtgccgcctacgacaaggtctcgccctacccgctggacgtcctcggcgcggaaaccgagggcatgatcggctacatgatcgaacaggaaatgggcaacctgctgccgttcgaagtgccgttcgccaccatcctcacccaggtcgaggtggacggtaaggatccggcgttccagaacccgaccaagccgatcggcccggtctactccagggaagaagccgagcgcctggccgccgagaagggctggagcatcgccccggacggcgacaagttccgccgcgtggtgcccagcccgcggccgaagcggatcttcgagatccgcccggtgaagtggctgctggagaaaggcaccatcgtcatctgcgctggcggcggcggtatcccgaccatgtacgacgaggccgggaagaagctcagcggcgtcgaggcggtgatcgacaaggacctctgctcctcgctgctggcccaggagctggtggccgacatcctgatcatcgccaccgacgtcgacgcggcctacgtcgactggggcaagccgacccagaaggccatcgcccaggcccacccggacgaactggagcgcctcggcttcgccgccggctccatgggtccgaaggtccaggccgccatcgagttcgcccgcgccaccggcaaggacgcggtgatcggttcgctcgcggacatcgtcgcgatcaccgagggcaaggcgggaacacgggtcagcacacgcaaggcgggcatcgagtaccgctgatacaccacccccagggccgcttcgcggcccttcttcattctcctctgccggcatcgggcgaaaggtggatagcgccacgcctctgcgcgcggactttcaagcaagtcccgcaacactcgcctacgccccacctctgccaacagcccggccatgggcgtcaatctccccacggcagaccgccagcacttgtggaaagcccacgcaacgcggtattcagtaggaaaatacgtgactcgatagtcatgattcacgtcagcatagtcaccctgatcatttcaacggccactggctcgtgcccgggtccgtgaagctcgcctcgccgacgggaaaggccgccatcgccgccacgcgcttcccgctccggaccaggcagcagcccggcacgcgaacgactattcgaaggagtttctgagtgatgtctcgactaccggtcattgttggtttcggtggctacaacgcagcaggccgtagttccttccaccacggcttccgccgcatggtcatcgaatcgatggacccgcaggcgcgccaggaaaccctagccggcctggcggtcatgatgaaactggtcaaggccgaaggcggccgctacctggccgaagacggcacgccgctgtccccggaggacatcgagcggcgctacgccgaacgcatcttcgcctctaccctggtgcgacgcatcgaaccgcagtacctcgacccggatgcagtccactggcacaaggtcctcgagctgtcccctgccgaaggccaggcgctgaccttcaaggcctcgcccaagcaactgcccgagccgctgccggccaactggtcgatcgctcccgcggaggacggcgaggtgctggtgagcatccacgagcgctgcgagttcaaggtggacagctaccgtgcgctgacggtgaagtccgccggccagttgcccaccggtttcgaaccgggcgagctgtacaactcgcgcttccacccgcgcggcctgcagatgtcggtggtcgccgcgaccgacgcgatccgctccaccggcatcgactggaagaccatcgtcgacaacgtccagcccgacgagatcgcggtattctccggcagcatcatgagccagctcgacgacaacggtttcggcggcctgatgcaatcccgcctgaagggccaccgggtctcggccaagcaactgccgctgggcttcaacagcatgcccaccgatttcatcaatgcctacgtgctcggcagcgtcggcatgaccggcagcatcacaggcgcctgcgccaccttcctctacaacctgcagaagggtatcgacgtcatcaccagcggccaggcccgggtggtcatcgtcggcaacagcgaggcgccgatcctgccggagtgcatcgagggctacagtgccatgggcgcactggccaccgaagaaggcctgcgcctgatcgaaggccgcgacgacgtggacttccgccgcgccagccggccgttcggcgagaactgcggcttcaccctggccgagtccagccaatacgtagtgctgatggacgacgaactggccctgcgcctgggcgcggatatccacggcgcggtaaccgacgtgttcatcaacgccgacggtttcaagaagtccatctccgcccccggcccgggcaactacctgacggtagccaaggcggtggccagcgcggtgcagatcgtcggcctggacaccgtgcgccacgccagcttcgtccacgcccacggctccagcacgccggccaaccgggtcaccgaatcggaaatcctcgaccgcgtggccagcgccttcggcatcgacggctggccggtcaccgcggtgaaggcctacgtcggccactccctggccaccgccagcgccgatcaactgatttccgccctgggcaccttcaagtacggcatcctccctgggatcaagaccatcgacaaggtcgccgacgacgtccaccagcagcgcctgagcatctccaatcgcgacatgcgccaggacaagccgctggaggtgtgcttcatcaactccaagggcttcggcggcaacaacgccagcggcgtggtgctgtcgccgcgaatcgccgagaagatgctgcgcaagcgccatggccaagcggccttcgccgcctacgtcgagaagcgcgagcagacccgcgccgccgcccgcgcctacgaccagcgcgcgctgcagggcgacctggagatcatctacaacttcggccaggacctgatcgacgaacacgccatcgaggtcagcgccgaacaggtgacggtgcccggcttcagccagccgctggtatacaagaaggacgcgcgtttcagcgacatgctcgactgagcgccgccacaacggaaaaggcccggctagaccgggccttttcgtttcagtgcagcgcgcgccagttggatcagctcgctgcgccactcggcgccactacctagatgtgttggctcacgtattggcaagactggcatgacacaccagtaattgccagcccacgcaaccaaagccgccggtgaacaaagcctgccgggtctcctcgatgatcggctcacacatcagcatcgctatcccggggatcctctaacacatagatattgtattgccgtattttggcgtgtggaacccacttattctagtgcattagccaaaacatgtacattaaagattttttgaatgttatatagcaactccattcaaaattggagtacataaaatgccaatggaattccctccaactacagtaattggtcgcccacctttcgccacaccgttccctttgagcttttccggcctgagttctacaggctgggggcataatggcgaattggccgggcatggtccagccccggtcgatgaaagtgatgtttactgggatcttgtagctccagaaggtccatatcatctttggtacaaccagactcttcttaaaagcctggaaaactacataaagagtcgaacaggatatactccgagcctttataatgcctatttccttgaccttgcggtgaataagcaaaacccattactcgccctgtataacacatcagaattgatcatcgattggagcaagattcatcaaccacaaaaagagtggtacaccttaaaagaggtcacacagaatgcattcttccagagcaaggctattggtctcgcaatggcccatgatttcctgctttggaaggaagagagcaacgtaaatgactctcaatatcgagtacaagaagtattcgacaatggcgggcgcgacattctaatagatgaaaaacttgcagccaatccttactcttacgggaaagcgttatttcattatatttacgggaaaggtgcccccttgcacatgaacgtgccagatatcgggattaagcttactccccaagatattcaacctcttagggatatgatcaaaatgagtcatacccctaccacccgacctgtccacgttgagcggctctcatactggactggtagaatcagcaatgatgtgaagtacacgctgggaaatatcaccctgaaagtaacaggccagttccaacgcttcaccgatagccgctggaagttcacgggtacggttaaggtctgggatgacgtgtacgatgccaatctggatttccagcgccccatggatgagcaaacagcaaccagattcttggcagagttgaaaaattacggagccactaattttgacatcaagatgtacggcgaggctcccattgagctatcaggcactggagataagttgtaataccccctcgaaagcacctatctcttgataggtgctttctcatcactggaggaaagcacgtagtaaaaaaatacgaaccccagccataggggaagcatcgccttatactctccactgaaaaaagagcaggcaaaccctaccatccaaatcgcaagaagagttccactcaaaacctgtatgggcctgctacgaaatatcaagccgccagttttccgacaacctaagatcagcaatggcaggagtatcaaacagacagtaaaggcaaaaacgcaagaaacaagccaggaaattaatatattatccgcccaagtagggtatagcattctatccaaatttatagatgttactaaaacctctgagatcactatggaaactggaatcgcaaaatacaggaagaccaaaagtacacgatttcgcctcacgatcactggcgatggcaagaaatatatagcaagtgccaaaataagcgagcaaatcgaataccgctccaaataaattttatcggtaagctgcccaagcaactcatcctgaaataactcctcagcagccagccttgaagcatagtcatttatgtcctcaggataaatacttaccaacacatcagaactcttcaaaacatccatggtcagcgaagctgagaatagacaaatcgatattatcgctatcacaaccgcagctaaaatacgaaaacgatagagcaatagatatattggcataaagacctcccttaagctcatgcattctacgtcctgcaagtctttagccatgtgtgatttcgatggatttttcatggagcccatgatcctccccaggcttcggaaaaatcacacaggaacttactcaggcgccacccctatcggcaccggccgacagctcaacgaaaagccccgctcatacggtcatgccgttcaccaaagtgaatatttgatgagccactaccgaatcccgctgtcagtcatctgctgcgggctatttgcatgttttctgtcagcccgagcgggcaaaacatcgtaatctcccatagagaccagaaaacagatcagaaaaacgccgcgcccccattggggtgcggcgtttttcttaagtaaacagcattagggttcgaccagctcttccgtttcagtgcagcgcgcgcgccagttggatcagctcgctgcgccactcggcggcgcgcggcagggccaggaaggagccgttgaggtaatcctcgcgcggctcgtaggtgaatggcgcaccatgcaggtcgagcacctcgccgccggcgccttccagcacaccctgggcggcggccgtgtcccattgcgaggttggcgtcaggcgcggatagcagtcggcagcgccctcggccagcaggcagaacttcagcgaactgccgatgctggctcgccgcaggtcgccgaagcgctcgctcaagccatccagcaggcgctcctgggccgggctgccatggcgcttgctggccaccacggtgaaggcctcctcgggctccaggcgcacactgatcggttgcgcgcggccatcggcctcctcgcgccaggcaccgagaccggcgccaccgtagtagcagcggccgctcaccggcacgccgaccagaccgaacagcacccggccatcctcgaccagggccacgttgacggtgaactcctcgctaccggagatgaactccttggtgccgtccagggggtccaccagccaccagcgccgccagtggccgcgctcgctcagcggtatctcgcaatcctcttcggaaagcactggaatgtccggcgccagcgcccgcaaccccgcctccaatatatggtgcgcggccaggtcggcggcggtcaccggcgattcgtcggccttcgagcgcaccgccacgtcggcgcgccagtgcggcaggatcgcctcgccggcgcgccgcaccagcgccaccaattcgccccagggcaccggtctcatgcctggtactcgccgcgctgagtgagcaggtcgcgtaccaggtacagcgcagccagggcgcggccttcgctgaactgggcgtgctgggccaggctcgacagttcgcgcaggctgatgcgatcgacgcccatcggctccggctcgtcgcccggcaggcgctcctcgtagaggtcgcgcgccagcaccacctggatgcgctggctcatgtagcccggcgacagcgacagttcggtgatgtgctccagttgccgggcaccgtagcccgcttcctccttgagctcgcggttggccgccgcgaggatgtcctcgcccggctcgaccaggcccttgggcagcgacaactggtattcgtcgaccccggcgcaatattcctccaccagcaccgcgtgctcggcatcgagcatggccaccaccatcaccgcaccgtagccctggcccttgccgaccagacgctcgtaggtgcgctcgacgccattgctgaagcgcagttgcaactcctcgacagcgaacagtcggctcttcgcgacgatctcgctggcgagtacggtgggtttctgacgcatgtggataactccttggcgaagccggcgggttatcataccccggcttttccgattatccctgtcggagattgatgggaagcgacagatttccgcatcgatcgcgacgaaccgcgacaagagccgccatgcccaccctgccctggtccgccatcgacaccgtgctgctcgacatggacggcaccctgctcgacctgcacttcgacaaccacttctggctggaacacctgccccagcgctatgccgaacgcaacggcctgagtcgcaccgaagccgacgccgtgctcgagccgctgttccgcgaacacgccggccagctcaactggtactgcctggatttctggagccgggaactggacctgtcgatccgcgaactcaagcacgaggtggcgcacctgatctcgctgcgtccgcacgccgataccttcctcgccgccctgcgccgggccggcaagcgcgtggcgctgatcaccaacgcgcaccgcgactcgctgtcgctgaagctggaacggatcgaactggcgccctatttcgaccgactgatcagctcccacgactacggctacccgaaggaggacgcgcgcttctggagcgccctgcaagccgatttcggcttcgacccgcagcgcagcctgttcatcgacgacagcctgccgatcctgcgcagcgcccgcgcctatggtgtcgcccacctgttggcggtacgccacccggacagccgtggccaggtccgggacaccgaggagttcgccgcccaggaggactaccggcggctgctcgaaggactgccgtagccgcggaaacgaaaaccccgccacgcgggcggggttggcgaaacgccgggatcactcgggaatgcgcaggacctggccggggtagatcttgtccggatggctgagcatcggcttgttggcctcgaagatcttcatgtaggcgttggcattgccgtattcggccttggcgatggcgctcagggtgtcgcctttcttcacggtgacgaagcgcgcctccggagcggcctgggccacggtgatcttgtcttccaccgaggagacgccggcgacgttgcccagcgccagcaggatcttctctttctcctcctggctggccacctcgcccgaggcgatgaccttgtcgccttccaccgaaacctggatgttcgggttgcccaggccgaccttggcgacgtgctccttcagcgactcggccgcctgtgcctcatgccccgtcagcgtatcccacagcttttcaccggcttccttcacgaacgcgaaaatacccatctttggttctccctttacggttacggttgcaagcggccggcgcaatcccgatccgcgactagccaagtctagactgcaaaaaccggcgaaatatccccaggctccttcgtcaccccataacactgcgcccattcgcgttaagattcggcgacacccccgccacggaagcgccgatggacatcaagcaactgaaattcctctgcgccctcgacgaaacccgccacttcggccaggccgccgcgcgctgccacgtcacccagccgaccctgtccatgcgcctgcgcagcctggaggaagaactcggcctggaactggtgcgacgcagccagcgcttcgaaggcttcaccgaggccggcgagcgcgtactggcctgggcacgcagcctgctggcggcccaggaagggctgtacgcggaagccgccgcctgccgcgggcaactggtcgggaccctgcgcctgggcgtggtgccgctggccagcttcgacccgatgcgcctggtccagcacatggccgggcgccacccggagttgcgtttccagctctattccctgagttcggaacaggtactcgaaggcctggcgcgcaaccagttcgatctcggcgtctcttatctggaccgtctggaccgcagccatttcgagggcatcgaactggcggagacccgcatgggcctgctccatcaccccagccatttcccgctcgacgccgcgctgctgaactgggaagcgctggctggcctgccgctaggcctgctctcggcgggcatgcacttccgccaatccatcgaccacaacttccgcagccgcgggttgagccccatcgcgcgcctggaaaccgactcggtacagcaactgctgcaggcggtgcagcgcggcttgtgctgcgcgatcatgccgctgggcagcgaagtcgacggcgagttgcgcctgatccccatcgaggacgcccataccctggcagcgctcggtctgatcatccgcagcggacagccgcgctcggcgctggccgaagcctgtttcgaggaagcccggaactggttggcgccgcagtcttgatagatcacgtcgatcagcgcatcggcacaaccgattagacgctgccccgcgtcaggcctaggctggtgccacacctagaacgatagggcccagcccatgccttgccagcctgcatgcccggtatccgcggatacctgggcgccttccgccgttcccgacgattaccgctacgccgacctgcacctgccgcagcaggtcggccaggcctcccttgccgccgagagtgccgtggcgatcagctacaacggactgaaccaggcggtgatgatggcctcgcccgaggacatcgaggatttcgtccgcggtttcagcctcagcagcggcttcgtggagtccatcgacgacatctatgaaatccgcgtcagcggccagggcgaatccctccacgccgaggtcgaaatcagcagccgcgcgttctggaacctcaagcgccaacgccggcaactggccggcacttccggatgcggcctgtgcggcgtcgaagccctggagcaggccctgccgcaactgccggaacggtcgccgcaggcgctgcctcccgccgcccatctcggcgccctgcgccagcgtatcgagcaggcccagcgactggcgcgccatagcggcgccctgcatgccgcgctgtatttcgacgggcatggcgagctgcgcctgtgtcgcgaggacatcggccgccacaacgccctcgacaagctgatcggcgccctgcaccgccaaggcctcgacgccgcgcgcggtttcgccgtggtcaccagccgctgcagcctggagcttatccacaaggccgtacgtgccgggatcggcaccctggtcagcctctccgcacccaccgccctgaccgtgcaatgggcgcgccgccaccaactgaacctgatccaccagccccatcacaacgccccgcgggtctacagcccggcgccggccgcaaccgagtgagtccgccatgagcctgcaacctctccaaccccgctacaagccctatgccggcgccgccgccggctggggcgcgctgcgcagcgtggcgcacttctggctggacagcaaacagccgttcaagaacctccgcgccctgctcaagaccaaccagaacggcggtttcgactgccccggctgcgcctggggcgactcgccggaagacggccgggtgaagttctgcgagaacggtgccaaggcagtcaactgggaagccaccaagcgccgcgtcgacgcggcgttcttcgcccgctacagcgtcagcgccctgcgcgaacagagcgactactggctggaataccagggccgcctcaccggaccgatgcgctacgacccgctcagcgaccactaccagccgatcacctgggacgccgccttcgccctggtcgccgagcacctgcgacgcctggatagccccgaccaggcggagttctatacctccgggcgggccagcaacgaggcggcctacctctaccagttgttcgtccgcgcgttcggcacaaacaacttccccgactgctcgaacatgtgccacgaagccagcggcgtggcactgggtcgcagcgtcggggtcggcaagggcagcgtgaccttcgacgacttcgaacacgccgacgcgatcttcatccttgggcagaaccccggcaccaaccacccgcgcatgctcgagccgctgcgcgaagcagtgaagcgcggcgcccaggtggtctgcttcaaccctctcaaggagcgcggcctggagcgcttccagcatccgcagaatgcgctggaaatgctgaccaacgggtcctcgccgctgaacaccgcgttcttccgtccggcactgggcggcgacatggcggcgatccgcgggatcgccaagttcctcctcgcctgggagcgcgacgcccaggccgagggcggcgagccggtattcgaccacgccttcatcgccgagcacaccgacggcctcgaggcctacctggccgaactggatgccaccccctgggaacacctggagcgccagtccgggctgagcctggcggaaatcgaacaggctgcgcggatgtaccggcgggcgaacagggtcatcgtctgctgggcgatgggcatcacccaacaccatcattcggtggcgatcatccaggaaatcgtcaacctgcaacttctgcgcggcaacctgggccgcccgggcgccggtctctgcccggtccgcggccacagcaacgtgcagggcgaccgcaccatgggcatcaacgagcggccgccggcggcgctgctcgacgcactggaacggcgcttcggcttcgaagtgccacgccacaacgggcacaacgccgtcgaggcgatcgccgcgatgctcgccggcaagtcgaaggtcttcatcggcctgggcggcaatttcgcccaggccaccccggacagtccgcgcacccacgccgccctggcgtcatgcgacctgaccgtgcacatcagcaccaagctcaaccgcagccacctgaccaccggccgcgacgcactgatcctgccctgcctggggcgcaccgacatcgaccgccaggccgaaggcccgcaggcggtcacggtggaagactcgttcagcatgatccacgcatcctacgggcaactggagccgctctcgcagcagatgcgttcggagccggcgatcatcgccggcatcgccaaggcaaccctgggcaaccatccggtggactgggacgcgctgatcgccaactacgagcgcatccgcgagctgatcgccgacaccatccccggtttcgccgacttcaaccgccgcgtccgccatcccggtggcttctacctcggcaactccgccggcgaacgacgctggaacaccgccagcggcaaggccaacttcgtcgccaacccgctgccccgcgacctgttgccggcacaggtgcgcgacagcggcctcgaacccgacctgatcctgcagaccctgcgctcccatgaccagtacaacaccaccatctacggcctggacgatcgctatcgcggagtgaagggccagcgcgaagtggtattcgccaacgaggcggatatccgccgcctgggctaccagccgggcgacaaggtcgacctggtctcgctgtggagcgatggcatcgaacgccgggtacgccgcttcaccctgctcgccttcgacatcccggccggccaggcagccgcctactacccggaaaccaatcccctggtgccgctggagagcgtcggcgtcggcagccatacgccgacttcgaagttcatcgcggtacgcctggaaaaggccacgggcgacgggcgcattatctgaagcccatgaaaaacgccgcctcctgcaacaggaggcggcgtcttaaggaaaaagtcgatgaaaggccttgaaggcaggccgctcgtcggcgttagaatggccagcatcccgccagcaaaaataccgatttcgaccctgaaatcgcgcttcacattcggtctacgaccgcctctacttaagaaagttccccatacaaaacaagtacttggaatatttcgaatttgctctaccaatcgtcggctggcgcttgtcagcggtttgggccaaccccagcatcgcagccgtcatccccacagagagaaactctctatgaagtattcctcgatactcctgttgtccctgagtctggtcggtagtaccgccttcgcaggcgacgacacccgcgcggccatcggcggcgccttgggcggggtgttgggttcggtcgtcggcgatgcggtcggcggcagcactggcgccgcgatcggtagtggcatcggtggcgctgcgggcggtgcagtcggcgccggacgcggcaacaagaccgaagcggcgatcggcggcggcctcggtgccgcaggcggcaacgtcatcggccggcagatcggtggcagcaccggtggcctgatcggcgcggccctcggcggcgccggcggcggcgcgctgggcaaccattatggcgacggcaaccgccgctacgacgacgatgacgactaccgcgaccgtcgctactaccgccgcgccggctatcgcgatggctattaccggcatgacaacggccatcactatggccagtacaagaagtggaagcgccacaagcatcatcgtcgctactacgacgactgaacccgccgctccctacgacgcaaaggccgggccggatggtccggcctttgtgcgaacgaccgtatttccctcccgattgaaacgatgaggcacgcacgatgcgtaaatctctcctggtaatcgcgttcggcctgctgagcgcacaagccgcgctcgccggcgattccaccaagaccgcggtgggcggcggcgtaggcggtgccctgggcaacgtcgtgggcggcgccatcggcggtagcaccggtgccgccataggcgccggcctgggtggcgcggccggcggcgcgatgaccgccaaggacgggcgcaagaccgaagccgccctgggtggcgggctaggcgcggccggcggttcggtgatcggcaacaagctgggcggcagcaccggcgcgaccataggtgcaggcctcggcggcgcagcgggtggcgcggtcggtaacaacctgggcaaggacaacgacagcggtcaccgcggcaagaaacaccgcaagcacaagcatcgttgatcggcatgcttgccgaagctgatgtgtaaaagccccgcgaacgcggggcttttactttctaccgttcgtcagcctttcggtgccgttttcaactcgtcgcgaacgatcaggacgccacgcggcgcctcgattccgacccgggcctggttgccgatgatatcggtgaccaggatccggatgccgccttcgcgcaattgccgaatcagttcctccgccgggtagtcggccttgagggacagggtgatgccttcgccttctcggcgggagagtatcaggaaacccatgttccgcgtccttgccagtcatagcaggggcaaaccggcccctttggtgaatgaaatggtgtggagggatggtcacagaacattgctccagcgtcgagactgcaaacgttcaatcagaaatgtcccatccagcgcttcctgttcgcctcacgccatgtcatggattgtcgcaccgggctcgctttgctagcgtgccggacatcaattccatccgagatttccagatgcgcccgtcgttcgccagttggggcctgcttgccctcctgctcctgcaaggcccgttgctccaggcccagccgctgtcaccggctctccagcaactgttgagcctgagcagccagcgtttgcaactagccgatcaggtagcccagagcaaggcccagtcgggcaaggcggtacaggacagcccgcgggaagaacaacagttgcagatgctcgccggacaagccgggagccacggggtcggcgccgagcaggtgcgcctgctgttcgccgcgcagatcgaggcgaacaagctggtccagtaccgcctgctcagccggccgctaccggacgctggccaggcggtcgacctggagcgcatccgcagccgcctcaatcagctcaacctggagctgctgcgcggctacgccccggcgctcgccgaactgcgcgtcgacgactgccggccgaggctcaaccaggcgctgcaacggcaggtacgcgacgatcgcctggacgagctgcacgccatcgccctgtcacgggcggcgggcgatctctgtcactgggccgcgctctgaagcgcggccagcgcatcgcgtagttcctgcggaatggccaccgggcggctgcttcggcgctccacgaagacatgcacgaaacgcccggccgcgcaggcctcccgctgcccttcgaggaacaaggccagttcgtactgcaccgagctgctgcccaggcgcgccacccgcaggcccatctcgatccgctgggggaaggccaccggcgcgaaatagtcgcagctggaactgaccaccaggccgatcacttcgccgccctggatatccaggccgccgcgctcgatcaggtaggtattcaccgccgtgtcgaagaacgcatagtaggtcacgttgttcacgtgtccatagatgtcgttgtcgtgccagcgcgtggtgatcggctggaaatgaaggtactgctcgcgcagcggtcgcggggcggtcgccatgcccggtcctcgtagaagggattcagtatgccgcgcgatagatcgccagggcatccgcctcgccgacctcgcgcgggttgttgaccagcagacgctgctggagcatcgcgtcggcggccaggcgcggcagcatcgcctcgtccaccccggcgtcgcgcaagcggctcggcaggccgttgcgcggactgagctgggccagttcgtcgatcagctgcacggtaagcgcgtcgcgatcgcccggacgcaagcggtcgcccagcagcagcggcgccagctcggcatagagtccagcggcagcgggagcgttgaaacggatcacctccggtagcaccagcgcattgctcaggccgtggggaatgtggaaatgccctcccagcggataggccagggcatgcaccgccgccaccggcgcattggcgaaggcctgcccggccaggcaggcgcccagcagcatggcctggcgcgcctcgcggtcgccgccgtcgcctaccgcgcgttccaggttggccgccagcaggcgcaacgcctcccgcgccagcaggtcggacagcgggttcttcttcagtttgctggtatagctctcgatcgcatgcaccatcgcgtcgataccggtcgccgcggtgaccgccggcggcaagccgagggtcaggtcggcgtcgagcagcgccaggtcgggcagcaagtggggcgagaccacgcccatcttggtggtctcgccggtggtgacgatggcgatcggcgtcacctcggagccggtcccggcggtggtcggcacctggatcagcggcaggcgcggcccgcgtgcgttgccgaccccgaagacctcgccgagcccctgccctgcttctgggtgggcgagcagcgcgaccagcttggctacgtccatggagctgccgccgccgaaaccgaccaccagctcggcagccatgccccgcgcccgcccgagcgcggcctcgaccaccgcctcgggcggatcggcgagcacctggtcgtacacctcgacggccaggcccaggcgcgggaagccgggcaggatcgcatccagcaagccgagccgggtgatccccgggtcggtcacgatcaacacgcggcgggcccttcgctcgcggcagagttccgccaggcggatggcggagccggcctcgcagaggatctgcgcggtagtggcgaaactgaaagcttgcatatcggtctccttgggcgagacgcccgtcagaacgagaaatgctcctcgggcagggccatcaggcagtcggcgccaccgagcaaggcttcgcggtgcatgctcgcccgcggcaggatgcgccgcaggtagaaataggcgctgcgcagcttggcccgatagaaatcgccctcgccggagccgccgtccagcgcttcctgggctcgtgccgcggcttgcaaccagagggccgcgagcaatacgtaggcgctgtactggaggaagtccaccgaagtggcgccgatctcctggggatcgcgggcgcaggcctcgagtacctggccggtgagctgccgccactcttccaggcgttgcagcaccggctcagccagtggcgccagcacagcacgcccttgcagcgcctcgctggccaccgccagttcgccttgcagcgccagcagttcgccgccctggtcgccgagcagcttgcggcggaccagatcgagcgcctggatgccattggtgccttcgtatatctgggtgatgcgactgtcgcgcatcaattgctccatgccccattcgcggatgaaaccgtgaccgccatagacctgtacgccgaggctggcgacttcctggccgacatcggtaaggaaggccttgacgatggggatcagcagcgctgcacggcgcgtcgccgcgcgccggccgtcggcatccggatggccgtgttccaggtcgagctggcgtgcgcagcaggccgccagcatgcggcagccttcgaccagggtcttctgggtcagcagcatgcgccgcacgtcggggtgcacgatgatcgggtcggcgaccttgtccggtgcctgcgggccgaccagggcgcgcgactgcaggcgttcgcgggcgtagccgagggcgccctggaaggcccgttcggcgatacccaggccctgcaggccgacctggaagcgcgcgtcgttcatcatcgtgaacatgcaggccaggccctggttcgcttggcccagcagccagcccctggcgccgtcgaagttcatcacgcaggtggaagcgcccttgatccccatcttgtgctcgatggcgccgcaccccaggctattgcgctcgcccagggagccatcgggattggcgacgaacttcggcaccaggaacagactgatgcccttcaccccggccggcgcgtccgccaggcgcgccagcaccaggtggacgatgttctcggtgaggtcctgctcgccaccgctgatgaagatcttgctgccgctgatcgcgtagctgccgtcggcctgcgcctcggcgcgggtgcgcaggagggcgaggtcggtgccggcctggggttcggtcaggcacatggtgccggcccattcgccgctcaccagcttggccaggtagtcgcgccgcaacgcctcgtcgccatgcttgtacagggccagcacggcgccctcggtcagccccgaatagacgcggaaggacaggctggcggccatcagcatctcgtggaagcacgcggagaccatctgcgggaagccctggccgccgtactcggtgggtccggtcatgctcgcccagccgttctcgctgtactgccggtaggcttcgcgaaagccggtgggggtggtcaccacgccgtccttcagcttcgagccttcctcgtcgctgttgcgattgagcggcgccaccacctggccggtgtagcgcgcgccttcctcgagcacgccgtcgatcagttcgcgatcgatgccgttgcccagcagttcgcaatgcgcgccgacatcgaacagttcatggagaacgaagcgcatgtcgcgcaagggggcctggtaatccatctcagcgcgcctcctgcaggtcggcgaaggctccgccctcggcggccaggcgctcgaccagggacgccggcttccagcgcgcgccgtggcgctgttcgaggaaacgcaagcgttgcagcagctcggccgcgccgaggcgatcggcccaggccatgggaccgccctccgcggcggggaagccgtagccgttcaggtagacagtgtcgatgtcggcactacgggcggcgataccctcgtcgaggatcttcgcgccctcgttgaccagcgccagcaggcaacgctcgaggatttcctcgtcggcgaaatcgcgccgcgggtagcccagcgtctcggcaacccggagcaccagggcatccacctcggtatcgtgctccgcctggcggctgcccggcgcgtagcggtagtagccggcaccgctcttctggccgaagcggcccatctcgcaaaggcggttgtccacctgcacggccggctggtcctggccgaccccggccaactcgcgggcgcgccactcaaggtcgataccgaccacgtcgtacatgcggaacggccccatggcgaaaccgaacgcctggagagcccggtccacctggtacggcagggcgccttccagcagcatcaggcgggcctcggtggcgtagggttcgagcatgcggttgccgatgaagccgtggcagttgccggccaccacgctgaccttgcccatccgctcgcccagcgccagggccgcctccagcaccgccggcgcggtctgcgcgccgcgcacgatctccagcagccgcatgatgtgcgccgggctgaagaagtgcaggccgagcacctgacgcggacgcgcggtgaccgcggcgatggcgtcgatgtccaggtaggaggtattgctggccagcaccgcggagggcttcagcgccgcgtccagctcgcggaagatcgattgcttgagttccaggttctcgtagaccgcctcgatcaccaggtccgcctcgcgcatcgcggcgaggtgctggaccggcgtgatgcgggcgcggcgcgcggccgcttcctcttcgccgatgcgcccctggcgcacgttgtgcgcgtaggtgtcggccacggcgccgagcgcctggttgagcatctgcgggttgctgtccagccactgcacgtcgagaccggcgttggccaggcacatgacgataccgcgacccatggtgccggcgccgatcaccgcggcctggcggaaggaaaagttctggctcatggtcttgtcctcgttgtagcgagcgcaggaggaacggtggacgaaacctggggcagtccgaccgcacaaaaagcgaccactaccttaggggaaggtcgtactatttttgaaatttagtcttgtgatagctggaattcaggcagtgaatatccaaaccttcgacctcaacctgctacgcgtccttgacgcgctgctgcgcgaacgcaacgtctcgcgcgcggcggagcgcctggcgctgagccagccggcagtaagcaatgcgctgaaccgcctgcgcgagctgctcgacgacccgcttctggtccgcgccggtcgtgcgatgcagccgacgccccgggcgctggcgctggaagcgccgatccgcgcggcgctgcggcagatcgaacagagcctgggcgacggcgagggcttcgatccggggcgcagccggcagcgcttcaccgtagcggtgaccgactacgtcgaactgatctgcatgcccgccctgatgcgccgcctgagtgagcgggcgccgggaatctccatcgccatccagcacctgaccccgaccttgccggccgaggcgctggacaaaggcgaactggacctggtgctaggccgcttcgaaaacgtcccggcgcgcttccagcgccgccattgggccagcgagatcctgcaactggtcgcccggcgtcagcacccgctgctggcgcaggctcccgacctggccaccttcctggagctgcagcacctgtgggtgcacggcgggcagaccaaggggatggtcgaccagtggctgggcagccaggggctcaagcggcaagtggcctacaccacgccgaactacctgcaggcagcgcacatcgccgcgtacagcgacctggtcggcgtcctgccgcgacaactggcgcactacttcgaacgattgctgcccctgcaatcgttcgacctgccgttcgacctcggcccgttccacctggaactggtgtttctggcccagcgcgaacgcgacatcgccctgcaatggctggtcgaacagatccgccaggtcggggccgccggaccggactaggggaatccgggcagtcagaagcggtcgcgaatgaccagttcttcccgcggcagcttgccgctgcgcggccagggttcaacggcctttttcccgaccgcgaccatcaggccgatcacatggttgtccggcaggttgatcagccgggccacggcatcgaagtcgaaaccatccatcggacacgaatccaggccctggccgcgggcgaccagcatcagggtctgcgccagcaggccgcagctgcgcatggcttcgtcgcgctgtacctggggcttgccgcggtagtaggtgtcgatggcgcctgccatgaacgcctgtaccgcctcgggagcaccgtcccagacccgctgcgcgttgcgctcccaactgtcgagctgggcgcacaccaccaccagcatcgccgcgtcggtgacctgcgcctggtcccaggccacttcacgcaactgcacgcgcaattgcggatcgctgacctcgaccagccgcacgtgttgcaggttgaaggcggaaggcgcatgcagcgccaggtccaggagatggtccttctcttcgcgagtcaggctgaaggatgagtcgtagcccttgatggcacggcgactacgaacggcgtcttcgatatgcatgggggaaatccactgcgagggaacaaaggggcgcccactctagggcattggcgagaagataaaccagacttcaataaatccgacgcagccccacagcagctacttacagaattaggactaggactattcctaggaaggaattttcctaaggaattgtcctatattccactccaatgccagcgcctgggagagggcccctcccgggacgcacgaacgcagaaaaataaggatgaactcacgtaggagtaagctcatgaacaggatgggccaactggctttgttcggtcttcttgtaggaacttccagcaacctgttcgccgcccccggcagcatcagcggcgtcatccgcttcaccggcgccattgtcgagccaccatgctcgatgagcgctccccgccaagacgaaagcaagggcagtttccacctcagtggctgtcccatgcaggcgcgcaccgcggatgtcagcatccgttcgatgaagaccggcgaggtgcgccacttgcaacccagcgatacggtcatcggtgaacgggatttctcggcgcgctatgagctggccggaagcgatcgccgctccggcaactacctgatcaccgtcacctacccctgacgttcgcccatgaaaaaaccgcccgaaggcggttttttcatggtgccgaaacgtggcttacagctgcgggccggcggccttgatcgcatcggaaacctcgaatttcttgaagttttcgatgaactgcttggccaggcccttcgccgcctcgtcgtaggcagcctggtcagcccaggtgttgcgcgggttgagcagattggtctcgacgcccggaacggccttcggcacgtccaggttgatgatgtccaggtgctcggtttccgcgccgatcagcgcgccgctctggatcgccgcgatcacgccacgggtggtcgggatgttgaagcgcttgcccacgccgtagccaccgccggtccagccagtgttgaccaggtagaccttggagccgaaggccttgatgcgcttgatcagcagctcggcatagacgccggccggacgcgggaagaaaggagcaccgaagcaggtggagaaggtcgacttgataccgccgccggaacccatctcggtggagccgaccagcgcggtgtagccggacaggaagtggtaggccgcctgctcattgttcaggatcgataccggcggcagtacgccggtcaggtcgcaggtcaggaagatcaccgcgttgggctcgccgccgaggttcttctccgaacgcttctcgacgtgctccagcgggtaggcggcgcggctgttctgggtcaggctgtcatcggcgtagttgggcacgcgctcttcgtcgagaaccacgttctccagcacggcgccgaacttgatggctttccagatgaccggctcgttcttctcggacaggtcgatgcacttggcatagcaaccgccttcgacgttgaacaccacgccctcgccccagccgtgctcgtcgtcaccgatcaggtaacggctttcatcggcggacagggtggtcttgccggtgccggacaggccgaagaacagggtcacatcgcccgcttcgccgatgttggcagcgcagtgcatcggcagcacgtcgcgctcgggcagcaggaagttctgcacggagaacatggctttcttcatctcgccggcatagcgcatgcctgcgatcagcactttcttctgggcgaaattgaggatcacgcaaccgtcggagttggtgccgtcgcgctcgggcacgcattcgaagttggcgacattgaggacctgccactcgtccttgccggccgggttgtactgctccggctcgatgaacaggcaacggccgaacagattctgccaggcggtagcggtggtcatcttcaccggcaggtagtaagcctcggcggaacctacatgaacatgggaaacgaaatggtcctgggcgttgttgaacgcttccacgcgggcccacagcgcatcgaacttgtcggccgggaacggacggttgatgttgccccaggcgatcgcgtccttggtgctcggctcttcgacgatgaaacggtcgaccggcgaacggccggtgcgatggccggtacgtacgaccagcgagccgttggcggccagttcgccctcaccgcggcgaatggcttcttctaccagttgggcggcgctgatatcggtgtacacggcgttgttggcttgcgtcatgtggttccccgtcggccagaggccgagtcctccaaacttcgtagcgcttcaaaaaactcactacaggaaaaaagtggcgggattatgccagaaaagcccgctggatgaaaaatcgtcagtggcgggtctcggaaggcccctggctgccagcgccagcgaacaactgggcgacgtcggaggcgtcgaacaggtagcgctggttgcagaactggcagtcgatgctgatcgagccttcttcctcctcgagcagccgctcgcagtcggcctgcccgagactgaccagggcgttggccgaacgttcccgcgagcaactgcaatggaagaccagcggttgcggctcgaacaggcgcacggtttcctcgtggtagaggcggtgcaggacggtctcgttgtccagcgccagcagctcttcggcggtcagcgtgtcggccagggtggtcaggtgctgccaactggcctcgcgggcctcggggtccttcaggcggtcggcgggaagctgctgcagcagcaggccgcgggcacggcggccgttggcgttgagccagaaacgggtcggcagctgttccgagctggcgaagtagttggacaggcattccgccaggttcaccccttccagggcgacgatcccctggtagcgctggcccttgaccgggtccacggtgagggtcagcacgccttcgggcatcagttcctgcatgccggcgtcggcgccgatggactccgccgaatagcgggccaggccacgcacctggcggtcgctggaacactccaccatcaacagcggaaccgcgccgctggagcgcgcctgcaataccagcaggccgtcgaacttgagcgtgccgcagagcagcgaggccgccgcgagcatctccccgagcagctgcgcgaccggttccggatagggatgtttggccagcacttcgctgtagctgcgctcgagatcgaccatctcgccgcgcacgtcggtatcgtcgaaaaggaaacgctggctctgatctgaatgggacatgcgggacacaacgctacgaatgagggaatgacaagtgagtgacaaaggcctataaaagcgcgcttcgtgacagtcgtacgccgacccggcgccgatagggggaaacgattttatggataatgcctctccgttccaagcggcctggcaatggcgcaagttcgccacctgtcatcttctggcgctcctgctgctgatcctgtggctctggggccccacccgcgagctgatgaacggcttcgacttctggctcttcgacaagctcaacggctccctcgccctcaacgaaacctggctgaaactctggggcctgctcagtacccgaccgttcgacgcggtggtcggggtgatcctgctctgcctgctgattcgcggcgactggctgctgccggcgaaccaggtacggcggctgaccttcggcttcatcgcgaccctgctgatcctggtggtgatccgcgtgctctacgcgaagatcgcccaccacctgcactggcagcacgccagcctgtcgatgctgatggacaaggccatccacctcagcgaccacttcccggactgggaacgcgtgtgggaaatcaaggaccgctccaaacgcagcttccccggcgaccacgcctcggtgctgctggtctgggcgctgttcatgtcgctgttcgctcgccgcgccgggcagttcctgctgatctggaccctggccgtgctgttcatgatgccgcgcctggtagccggcgcgcactggggccaggacgactacatcggcggcctgcagatggccctgctggccctcgcctggggctgctacacaccgctggcggcgaaggccagcggctggctggtgcaggtgaccgaaccgctgttccgcctgctggcgaaattgccgctgatcggccgcctcggcgtggtccgcgactcggcctgaggccatcccggtctcccctgcgggagaccggcgcttctcagtcctggccgccgcgcaactggtggatctgccgccgctgcttcttgctcggccgcccctctgtctgtacgcccagcgccccggccttgcgcatggccgccgcgcgctcgcggcttgccacgctgtccgcggtttcctcgtagagagcctgggcctccggcgcgccacgccggactacggaaagcgcgcgaatggtcacggttcgctcgtcgaagcccgtacgaatggtcaactcctcccctaccctgggttccttgctcggcttgcaccgctcgccccggcaatgcaccttgccgccctctatcgcggccttggccagcgcccgggtcttgaagaagcgcgccgcccagagccacttgtccaggcgcaccttgtcgtcgtctttctcgctcactggcatttcccgtattcgttccgccgctgtctcgcgactgtcatcgacagccgctaggttcgtcttcggcatcctcgggcagccgcctggcggccgcccatagccctgctagaatgccggcaaaacgcctggaatgcctacccgtgaagacattcgaccagctttccgtcatcggtctgcgcgagtggatcgcctttcccgaactgggcatggtcgggctgcgcgcgaagatcgacaccggcgccagcacctccagcctgcatgcatcggacatcgttcccttcgagcgcgacggcgagaagtgggtgcgcttcaccgcccacctcggcacgctggtgcagcgccggcaccgttgcgaagcgccgatggtcgcgcgcaagagcattcgcagctccaacggccaggcccagacccgctacgtgatccgcaccaccctggcgctgggcgatcgcatgtggccggtagagttcaccctggcctgccgcaagtccatgcgctatcgcgtgctgctcggctccaaggcgctgatcgccgggcaactggtggtcaacccggccctggcctacgtccaggatcgtcccgagtcgccggccgccctgcccgcggcgacgagcatcgacctgctcgacgggagcccggtttgagccattcgccggcagcacctgtccaacctccatccattcccgaaacggccggtccgatgcctgccgcgacgacaacccacagcctcgccgccgctgcccgccagccggtccaacccatccacaggtgctgaatgaaaatcgccgtgctgtcgcgcaatccccggctctactcgacccgtcgcctggtggaggccgggcgggagcgcggccatgaaatggtggtcatcgatacgctgcgcgcctacatgaacatcgccagccacaagccgcagatccactaccggggacaaccgctggagggcttcgacgcggtgatcccgcgcatcggcgcctcggtgaccttctacggctgcgcggtattgcgccagttcgagatgatgggcgtgttcccgctcaacgagtcggtcgccatcgctcgctcgcgggacaagctgcgctcgctgcaactgctgtcgcgcaagggcatcggcctgccggtgaccggcttcgctcattccccggacgacgtcccggacctgatcgagatggtcggtggcgcaccgctggtgatcaagctgctggagggcacccagggcatcggcgtggtcctctgcgaaaccgagaaggccgccgaatcggtgctcgaggctttcatgggactcaagcacaacatcatggtccaggagtacataaaggaagccggcggcgccgacatccgctgcttcgtggtcggcgacaaggtgatcgcctcgatgaagcgccaggcagcgcccggcgagttccgctccaacctgcaccgaggcggcagcgccagcctgatcaagatcaccccggaagaacgcatgaccgccatccgcgccgcccgcgtgatgggcctgaacgtcgccggggtggacatcctgcgctccaaccatggtccgctggtaatggaggtgaactcctcgccgggcctggaaggtatcgaatccaccaccggcaaggacatcgccgggatcatcatccagtacctggaaaagaacggcggcccccacctggccaggacgaagggaaaggggtgagccggaccagacaacgcatgcgttgtcccagcccatcggacgcaccgcattacgctggcgatcccggcctcgacagaaggtccatgccacgcttgaatgaagcaccgccgcaaccgatgccggaaaccccgccgaaccccgggctcttccggcactcgaatcctttcctgacgcttcacggaatcgccgcatgacctctcgtccttcctccgaccagacctggcagcccatcgacggccgggtggcgctgatcgcgccagcctcggccatcgccaccgacgtgctggaggcgaccctgcggcaactggaagtgcacggcgtggactaccatctcggccgccacgtcgaagcccgctaccgctacctcgccgggacggtcgagcagcgcctggaagacctgcacaacgccttcgacatgccggacatcaccgcggtctggtgcctgcgcggcggctacggctgcggccagttgctgccgggcctggactgggggcgcctgcaggcggcctctccgcgaccactgatcggtttctccgacatctcggtgttgctcagcgctttccaccgccacggcctgcctgcgatccacggcccggtggccaccggactcggtctgtcgccgctgagcgccccccgcgagcagcaggagcggctagcctctctggcctcggtcagccgcttgctggccggaatcgaccatgaactcccggtgcagcacctcggcggacacaagcaacgcgtcgaaggcgcgctgatcggcggcaacctcaccgccctggcctgcatggccggcacactcggcggcctgcacgccccggcggggtcgatcctggtcctggaggacgtcggcgaaccctactaccgcctggagcgcagcctctggcaattgctcgaaagcatcgacgcgtgccagctcggcgcgatctgcctgggctcgttcaccgattgcccgcgcaaggaagtcgcccacagcctggagcggatcttcggcgaatacgccgccgccatcgaggtgccgctctaccaccacctgcccagcgggcatggtgcgcagaaccgagcctggccttacgggaagaccgcggtgctcgagggaaaccggttgcgctggtagggacggggcgcgcccttctccgtaagcgcgagagggggcgggaagtgccgctggaacggcacaaacccgtcgggtatcaggccgcgccgcgcggcagcagcaaccccaacggcaggcagacccgcgcttccaggccgccgccatcgcggttgcgcagttcgacgctgccgccgtgctgggcggcgatgcgcttgacgatcgccaggccgaggccggtgcccttgccgccacgcgccttgtcgccacggatgaagggattgaagatgctgtccacttccgcgggatcgatgccctggccgcgatcgagcacgctcagcaccacgtagggcgccgcgctttcgccggccacgtagctggccacctccaccgaaccgccgccgtggttcagggcattgtcgatcaggttgcccagcagacgcttcatcgacacacgccgcaacggcatcgccggtaccggttgcaaggccatgcgcacctgctcgcgagtctggttgaacggcgccacgacctcgcgcaccaggtcggtcaggtcgccctcctccaccggctcgtcgcggccgtcgcggatgaaggcgaggaactggtcgaggatcgcgtccatgtcctcgatgtcgcggatcatgtcctcgaccatctcccgttcgctctccggcagcaactccagcgacaggcgcaggcgcgtcagcggggtgcgcaggtcgtgggagacaccggccaacatcaattcgcgttcgcgcccgccctgctcgatgtcctcggccatctggttgaaggcgcgatacacctcggccatttcactcggcgtctccggtcccagcggcaggcgcacgctgcgcccctggccgaactggcgggcggcgaccaccaggcgcttgagcggctggctgagctggcggacgaagatccaggcggcggcggtggagagcaggccgatgccgaggaaccagccgagcacgctccagatccgttggccacgcaagggatgcggatacagcggcaccgccagccagccttcgccgaggctcggtgcgcgcacccagagctgcgacggctggtggatacgcaggcgggtctcggtgtccggccccagctccatctgcatctgccgctggaagatttccgtgtacggccagtgctgctcgccgggctggtcggcgctgctcggcacccagcgcaggccggaagccttggcgatggccgcgcgcgactcctcgtcggcagcccagaacgcgcggatggtcagcgccgcgccgtggctgtactggcggtcgacgatcacgtcctcgttcatcagcaggtagaccagggtcagcgccttggagaacagcacgacgatcagcaccagccagagggtgcgggcgaagaagctttgcgggaaccagagcggcgttttcatcgatcggaccggttgcgcgccggcggacggggccgacgcctgttgcgggtaagacgacgcggccggtgcatcgctgcaccggccgcgcggagactcaggccttgcgcgcgttgccgtccggcacgaacacgtagccgacgccccagaccgtctggatatagcgcggcttggacggatccggctcgatcagccggcgcaggcgcgagatctgcacgtcgatggaacgctccagggcatcccactcgcggccacgggcgaggttcatcagcttgtcccgggtcagcggttcgcgggcgtgctgcaccagggccttgagcacggcgaactcgccggtggtcagcatgtgtacctcgtcgcccttcttcagttcgcgggtggcgaggaacagctggtagtcgccgaaggtcaccacctcgtcggcaccggcaggcgcgccgggcaccagcggcgcctggcggcgcagcacggccttgatccgcgccagcagttcgcgcgggttgaacggcttggccaggtagtcgtcggcgcccagttccaggccctggatgcggctgccctcgtcgcccttggcggtgagcatgatgatcggcacctggttgttctgttcgcgcaggcggcggcaggcagtgaggccgtcctcgccgggaagcatcaggtcgagcacaaccaactggaacagttcgcgggatagaaggcgatccatctgctcggtgttctccaccgcgcggacgcggtagccctgctcgtcgaggaaacgttcgagcaggcggcgcaggcgggcgtcgtcgtcgacgacgaggatcttttcaccttcggccagggcggcagggttcgacatagaaactcccagaatgagtcaggcgggcattatcgcccaggtagcggctgggccggactgtccattgttagcagatttttccccgaccagccgccctccaaggcgaaacttggcaggtataatgcggcgcttttgcggcggggcgttgtctacacggcccgttttcgttcgttttaccaggtggatcaatggacagcatcaacacccgtatcgccgaagagctctccgcactgccctccggccgcgttcaaccgcagcaagtcgccgctgccgtcgccctgctcgacgaaggctccaccgttcccttcatcgcccgttaccgcaaagaggtcaccggcagcctcgacgatacccagttgcgcatgctggaagagcgcctgcgctacctgcgcgaactggaagaacgccgcggcgcgatcctcgccagcatcgaggaacagggcaagctgacccccgaactggcccgcgacatcaagctcgccgacaccaagacccgtctcgaagacctctacctgccttataagcagaagcgccgcaccaagggccagatcgccctggaagccggcctcggcgcgctggccgacgcactgttcgacgacccgaccctggtcccggaaagcgaggccgcgcgtttcgtcgacgccgagaaaggcttcgccgacgtcaaggcggtgctggaaggcgccaagtacatcctcatggagcgcttcgccgaagacgccacgctgctcgacaagctgcgcgtgttcatgaagaacgaagcgaccctgaccgcccgcgtggtccccggcaaggaacaggaaggcgccaagttcagcgactacttcgaacacgatgagccgctgaaaagcgctccgtcgcaccgcgccctggcgatcttccgcggacgcaacgaaggcgtcctcagcgcctcgctgaaggtcggcgaggaagcgccgggcaccctgcacccatgcgaggtcatgatcgccgagcgcttcggcctgtccaaccagggccgcgccgccgacaagtggctggccgaggtggtgcgctggacctggaaggtcaagctctatacccacctggaaaccgacctgttcggcgagctccgcgacggcgccgaggacgaggcgatcagcgtgttcgcgcgcaacctgcacgacctgctgctggccgccccggccggcccgcgcgccaccctcggcctcgacccgggcctgcgcaccggggtcaaggtcgcggtggtcgacgccaccggcaagctgctggacaccgccaccgtctacccacatgcgccgaagaaccagtgggaccagaccctcgccgtgctcgccgcgctgtgcgccaagcaccaggtcgagctgatcgccatcggcaacggcaccgccagccgcgagaccgacaagctggccggcgaactgatcaagaagtatccgggcatgaagctgaccaagatcatggtcagcgaagccggcgcatcggtgtattccgcctccgaactggcggcgaaggagttccccgagctggacgtgtccctgcgcggcgccgtatccatcgcccgtcgcctgcaggacccgctggcggagctggtgaagatcgagcccaagtcgatcggcgtcggccagtaccagcacgacgtgtcccagctgaagctggcgcgtagcctggacgcggtggtcgaggattgcgtgaacgccgtcggcgtcgacgtcaacaccgcctccgccgccctgctggcacgcatctccggcctcaactcgacgctggcgcagaacatcgtcgcgcaccgcgacgccaacggagcgttccgcacccgcgacgagctgaagaaagtcagccgcctgggcgaaaagaccttcgagcaagccgccggcttcctccgcgtgatgaacggcgacaacccgctggacgcctcggcggtgcacccggagacctatccgctggtgcagcgcatcgccgccgacaccgagcgcgacatccgctcgctgatcggcgactcggcgttcctcaagcgcctcgacccgaagaagttcaccgacgagaccttcggcctgccgaccgtcaccgacatcctcaaggaactcgacaagcccggccgcgacccgcgtccggagttcaagaccgcagaattccaggaaggcgtcgagagcctcaaggacctcaagccgggcatggtcctggagggcgtggtgaccaacgtcaccaacttcggcgcgttcgtcgacatcggcgtccaccaggacggcctggtgcacatctcggcgctgtccgagaagttcgtcaaggatccgtacgaagtggtcaaggccggcgacatcgtcaaggtcaaggtcatggaagtggacatcccgcgcaaccgtgtcggcctgtccatgcgcatgagcgacacccccggcgagaaggtcgaaggccagcgcggcgggcgtcccaccggcagcggccagccgcgccaggagcgtggcgccccgcgcggacagagcgcgccgccggcgaacaacgccatggccgcgctgttcgccaacgccaagcaactgaagaagaagtgacggagccgtccatgagcgagatgcccgcccgcgagcagatgatcagcgcctacagcgaactggtcggcctggacccggtcagcctcggcgacggcgtcgccgaggtacgcctgccgatggccgcgcacctgcgcaaccgcggcggggtcatgcacggcggcgcgctgttctcgctgatggacgtgaccatggggctggcctgctccagttcccatggtttcgaccgccagagcgtcaccctggaatgcaagatcaactacatccgcgccgtcgccgacggcgaggtgcgctgcgtcgcccgcgtcctccatgccgggcgccgcagcctggtggtggaagccgaggtgcggcaaggcgacaaactggtcgcgaaaggacaaggtaccttcgcccagttgtaaaccggcgcggccgccatgcggcagaatggcgcgcaacggcgatcccgatccgtgccgggcgcccgcctcgacggctcccgccgaagtcgcggcgaccggccccaggacgaagcgaaaacgcatttacgtcctccctcttgtagaccgctcggtccaccctcatattggggcgaccgatctgggacgcgatcacaaggaatcccgacttgagcgatcttctctcccgccgcctggctctgctcggcgccgcagccaacctgcccctgctgaccgagtgcctgcatggcatcgagcgcgaatgcctgcgagtcgatagcgacggcaagctggcgctcaccccccacccccgggccctgggttcgaccctgacccatccgcagatcactaccgactactccgaggccttgctggagttcatcacgcccacggaaaccgacgtcgccgacactctgggcgatctcgagcgcatccaccgcttcgccagttcgaaactggacggcgaatacctgtggagcccatcgatgccctgcgagctgccggacgaggagagcatcccgatcgcccgctacggcagctcgatgatcggccgcctgaagtacgtctaccgcaagggcctggcgctgcgctacggcaagaccatgcagtgcatcgccggcatccactacaacttctccctgccggagaggctctggccgctgctgcgccaggccgaaggcagcgagctgtcggaacgcgactaccagtccgccgcctacatcgccctgattcgcaatttccgccgctacagctggctgctgatgtacctgttcggcgcctcgccggccctcgacgccggcttcctgcgtggccgcccgagccagttggagcgcctcgacgaacacacgctttacctgccctacgccaccagcctgcggatgagcgacctgggctaccagaacaacgcccaggccggcctgacgccctgctacaacgacctgcagagctacatcgacagcctgcgccaggcggtcagcacgccctacccgccctacgagaaggtcggcaccaagcaggatggcgaatgggtgcagctgaacaccaacatcctgcagatcgagaacgagtactactcgagcatccggccaaagcgcgtcacctacaccggcgagcgtccggtgcaggccctggccgctcgcggcgtgcagtacgtggaagtgcgctgcctggacatcaacccgttcctgccgctgggcatcgacctggacgaggcgcgcttcctcgacgccttcctgctgttctgcgcgttcagcgacagcccgctgctgaacggcgagtgcagcgacgccaccgacaacttcctcgccgtggtcaaggaaggcaggcggccgggcctgcaattgcaacgtcgcggccagccggtggaattgcaggtctgggcgaacgagctgctcgaacgaatcgccgacaccgcggcgctgctcgaccgcgcgcgcggcggcgaagcccacgcggcggcgctggcagcgcagcgggcgaaggtggccgatgcggaactgacgccttcggcgcaggtgctgaaggtcatgcgcgagcgcggcgagagcttcgaagcgttctccctgcgccagagccgcgaacacgcggagtatttccgccagcatccgctggccgccgaagagcaggcgcgcttcgagaagatggccagcgactccctggccgaacagacggagctggaacgcgaccaggatggcgacttcgataccttcgtcgccgcctaccaggcgagcatcctcggcctgatcagcaactgagccaagccggcgcgcccctgcgcccagggacgcgccggcggatcacaggctcttctcgaatacctgcgaattgcgctggaagttgtacagcgaggcccgcgccgccggtagccgttcgacgctgctgggctggaagccgcgctcgcggaaccagtgcgcggtccgcgtggtgagcacgaacagggtcttcaggccgagtccgcgcgcgcgctcctcgatccgctccagcagttcgtcgccacgcccgccgtggcggtactccgggttgaccgccagacaggccagctcgcccgcctcggaatcggcgatcgggtagagcgcggcgcaggcgatgatcagcccttcgcgctcgacgatgctgaactgttcgatctcgcgttccagcacctcgcgggaacggcgtaccaggatgccctgctcttccagcgggcggatcagctcgatcagcccgccaacgtcctcgatgcccgcctcgcgcaactgctcgaactgctcctgggcgaccagggtgccgttgccggtgcgggtgaatagctcgctgagcagcgcgccgtcctcggtgtagctgacgatatggctgcgcttgaccccggcccggcaggcctgcgccgcggcgtccagcagctcggcctggtagctgttgcccagccgttgcaggtgcgcgggcacctgctgcgggcgcagttcgcggaccagtttgccggatgcgtccagcaagccctgttcggcgccgtagagaatcagcttttccgcttccaggtcgatggcggcgcgcatggccacgtcttcacaggccaggttgaagatttccccggtcggcgagtagcccagcggcgagagcaggacgatgctgcgctcgtcgagaaggcggccaatacccttgcggtcgatgcgacggacctcgccggtatggtgatagtcgacaccctcgaccacgccgatcggccgcgcggtgaccaggttgccgccagcgacccgcaggcgcgcgccctgcatcggcgaggcggccatgtccatcgacagccgcgcctcgatggcgatgcgcaggctacccacggcgtcgatgacgcactccagggtcggtgcatcggtcactcgcaggtcgcggtgatagcgcggagccaggccgcgcgcggccaggcgcgcctcgatctgcggacgcgaaccgtgcaccagcaccaggcgcgcaccgaggctgtggagaaggactaggtcgtggacgatattgccgaaattgggatgctccaccccttcgccggggagcatgaccacgaaggtgcggtcccggtgcgagttgatgtagggcgaagcgtgacgtaaccagttgacgtagtcgggcatggtggggaaagcctgtcgtttcgtgagcgagagcaaagcgtgagcggccgggacggcccgaagggcgccgttatcgtcgtcgcagcaacatcgacaggcttctcctcactttctggttaacgagacggatggatcatgcgcgagtttaaaccctcggcggccccccggccgcgggattcgaccatggtacggggcctggggccggaacgaaccgttttaccactatttttgaaaaaaactatccgaaaaccccggttaactcgcacagcgctttttcgctaggctgcctcgttcgccgtgccgtccggcgcgcaaccacgcgaacgaggaaaatccatgagcgaatacttccatcacgtcctgatcggactgctcgccgtgcttccggtggccaacccgctgaccagcgtctcgctgctgctcggcctcggcggcagcctgccgccggcggagcgcaaccggcagatattcaaggccagcctctacgtggcgctgatcatgctggtcagcttctacggcggcagcctggtgatgcaggtgttcggcatctccattcccggcctgcgcatcgccggcgggctgatcgtcgcctatatcggtttcaccatgctgttccccgccaccacgccggacgagaccgaagtccagcacgacctgctgtcggacgaggaaaagatcaccccgcacttccgcgacctgtccttcgttccgctggccctgccgggtaccgcggggccggggaccatcgccctggtggtcagctcggcgtcgacgctgcaatccacctacggaagcattccgctgttcatccacctcgcagcgatcaccgtcaccctgctcaccgcgctgatcttctggatcgccctgcaaagctccgggcgcatcatgaagttcctcggcgaatccgggatcgacgccatctcgcgagtggtcggcttcctgctggtggcgatgggcgtgcagttcgtcatcaacggcggcttcgagctggtcgccggccacgccgcgcttcagtcggcggcgggcgtcaggcagtaatgctggatcagccggcgcagcacgccgaccatcggttcgatacgcgccagttcgaggtgctcgtcgggctggtgggcacaggcgatgtcgccggcaccgaggaccagggtctcgctgcccaggcgctggaagtacggcgcctcggtaccgaacgccacggcctcggcgcgatgcccggtcaggcgttcggcgacgcgtaccagttcgctgtcctgcgcctgttcgaacggcggcacggcagggaacagcggctggtagtcgatgctcacctggtgccgttcggccagcggccgcaggcgctggcggatcgcctcgcgcaactgctcaggctgcatgccgggtagcgggcgcaggtcgaattccagcgaacactggccgcagatgcggttgggattgtcgccaccgtggatgcaaccgaagttcagggtcggctggggcacgctgaactgcgggttgttccaggcccgctgccattccccgcgcagcgccatcagctcgccgatggtcgcgtgcatggcctccagggcgctacggccgaggttcggatcggacgaatggccgctctgcccgagaatctcgatgcgctccatcatcacccccttgtgcaggcggatcggccgcaggttggtcggctcgccgatcaccgtggcgcgacccagcggtcgcccgctttcggcgagggcacgggcgccggccatcgagctttcctcgtcgcaggtggcgaggatcatcagcggctggcggaacggctggtcgagcagcggcagcaaagcctcgatggccagcgggaagaagcccttcatgtcgcaactgccgaggccgtaccagcggccgtcgcgctcgtccaggcgcagcggatcgctgctccacagcgcttcgtcgtagggtacggtatcggtgtggccggccagcaccagcccgccgggaccgctgccgtagctggccagcaggttgaacttgcccggcgagacttcccggatctcgcagcggaagcctagatcgcccagccaggaggccagcaggtcgaccaccgggcggttggtctggtccagctcgggctgggtgcaactgacggaagacgcggcgatcagcgcgccgaactggtctttcagagacggcaacggcatgggactctccacacggatcgagccccatcatggcctatcgcggcagtggataaaaccgtccgttccggttccgcctgcgccagccgacgaagatcgcgctcaggcgccgaacagcgcgcgcaggaccaggaagaacaggatcgccagcaccgcgccggccggcagggtcactacccaggacaggaagatcgagccgatcacccgcaggttgagcgcgccgatgccgcgcgccatgccgatgccgagcaccgcgccgaccagggtatgggtggtggatacaggcaggccgatggccgaggcgccaaccaccgtggaggcggtcgccagctcggcggcgaagccgcggctgggggtcagctcggtgatctcccggccgatggtggcgatcacccggtagccataggtagccaggccgatgacgatgcccaccgcgcccagcagcagtacccaggacggcaccggcgaacggctcaccagatccaggtcgccgccggcctggaccaccgcgacgaccgccgccaccgggccgatggcgttggccacgtcgttggcaccatgggcgaaagccatggagcaggcggtgaagatcatcagcaccgcgaagacccgctcgacgctggcgaagccgccacgcggatcggctccgccagtgggtcggatgcgcaacagcaggacgatgcccaggcccatcaccaggccgccggcgagcaacgccaggcccagcgtctggaggccggaaagctccaggccgacatgcttcaggcccttgccgacggtcatcagcgcgaccatgaagcccgccaggaacatgtacagcggcacgtagcggcgcgcgctgcggaacgggtcctcggcatgcagtaccagccactgcacgctcctgaacagggcgaaggcgagcagcccggacagcaccggcgtcaccacccaactggcgacgatcgggccgatcgcgccccagtgcaccgcgtgcaccgagacaccgaccgaggcgaagccgatgatcgcgccgacgatggagtgggtggtcgacaccggccagcccttgatcgtcgccagcaacagccagaccccggcggccagcaaggccgagagcatgccgaagaccagcaggtcgggggtcatgtactgcgggtcgacgatgccgctcctgatcgtttcggtgacttcgccaccagcgaaataggcaccgcagaactcgaagaccatggccaccaggatcgcctggcggatggtcagagcgcgcgagcccaccgaagtgcccatggcgttggcgacgtcgttggcgccgacgccccaggccatgaagaaaccgaacaggcaggcgagtacgaggaaggcgaagccgtggtcggcgatcagggacatgggcggtatccgtgtgcaggcagggtcggaaagaagactggcgctcaccgcgccagcaattgctccaggcggttgccgacccgctgggcgcggtcggcgacatcgccgatccattcgatgatctggtagaggaacatcacgtccaccggcggcagctcgctttccagacggaacagctcgcggcgtacctcgacctggatgcggtcggtatcgttctcgatcgcctcgagttcctccaccatgctctccaccaggctggtctcgcgcccgccgaagccggtctcgagcagttcgttgagttcgttgaccacccgcaacgcctgggcgctggcgtccaccgagcgctgcacataggcgagcatctggccctgtagcggcaacgggatgcgcatgcgccggcccagcatcagcccgacgatgtccttggcgcgattggcgactttgtcctgtacactgagcagctccaacagatcggagcgcggcaccggaaggaacaggctcttgggcaggtgcatccggacgttcttcttcagccgatcggcttcctgctccagtcgcaccatgtcctgctgaacctgttcgacctgcgcccagtcctcggcgatcaccgcgcggaagaacggcaacaggccggccgcgcattcgtgggccttggcgatgtgctgctgcatcggcccgatcggcgaacggccgaacaggctgatgaacggattggtcggcatggaacgcctccctggtggaaatgccgaaaagtataggccacccaccccgcgcgcctttgatctggaacaccttcacccgcggacgcctggcgtcccgagccggacatcgccccatgcagaaagaaaccgaaatcaaactccgcgtcagccgcgccaccctggaagccttgcaggagcacccgttgctgaagaagcgcaacaaatcgggctgggagcgccgcgaactgtacaaccagtactacgacacccccggccgcgagctggcccgggccaaggtcgcactgcgcatgcgccgcgacggcgagcagtacatccagacgctgaaaagccgcgggcagagcgtggccgggttgtccgaacgcaacgagtgggactggtacctggaaaagaacaagctcgacctgaagaaactcgacgacaagtgctggccggcggccctcaaggatctcgacaagaagcagctcaagccgatcttcagcaccgacttcgtccgccagcgcgccgagatcgcctggggccgcggcaaggccagggtagtcgtggaggcggcgctcgacctgggcaaggtggtcgccggcgacaaccaggaggaaatctgcgaactggagctggaactgcgccagggcgatgccgccgcgctgctggagctggccgcggaactggccgccgacctgccgctgatgccctgcgacatcagcaaggccgagcgcggctaccgcctgttcgatccgaacagctacgaggtcgatcccccggcccagaaactgctggcggaaaccccgctggacggtgccttcgccgccatcgcctggtacctgctcggcagcagccagcgactggccgaacagtatcgcttcaacggccactggcgcctgctggaggactggctgcaacacctgcaggacctgcgcaccctgctcggcagcctcggccaggcggtgccacgcgccagcagtcgcgagctgcgcgaagcgctggacgctctccttgccgactgggcgccgcgcatcgagcgcggccgtgacgacgagacgctacgccagcaggcgccgcaactgttccgcggcgaactcgacgagacccgctggggcctgttctccctgaatacctcgcgctggctgctggccaaggcctggaccgagtcgcgcaacgagcgcggcaaccgccagggctctgccgcgctgggcaagtggctgctgcgtagccttgccgaagaagcccaggccacgccgctggcgcgcgcccaccagcatcccgagctgctccccgaccaagcgccgcgcctgcagcgcatgcttacctggttgcgcctggcgcgcggcgtgctcgacctgccggaagccgaccgcctctacggcgagctggccaagttgctggagctgctgcggcaacctgtcgatgccgagcgcctggctgcccgcgccgcgcaggcccatactgtgctgacgctcaaaccctggaaggcgctgatgaaataagcttcgccgctaccgccatcatccgaagggagtctgcatgtccgtgttcgccaccgccgcccaggaccgcctgctggacctcggcgacctgctccgcgagctggtcgcccagggccgggtcgggcaggagcaggccgaacagtgcctggcgatccgccgcagcgcggtgcgcaaccagcagcatccgctggagttcctcgccgcgcagcaggtcgaggatctcaagcgccccggacgcaagctcgacctggagaccctcacccagtggctggccgagtacgccggccagccctacctgcgcatcgacccgctgaagatcgacgtcgccgcggtgactccgctgatgtcctacgccttcgcccagcgccatggcatcctcgccgtcgcgctgagtccggaggaagtcaccatcgccagcgcccagcccttcgtacagggctgggaaagcaacctggtgcatgtgctcaagcgaccgatcaagcgggtggtggcgaacccggcggacatccagcgctacaccgtcgagttcttccgcctggcccgctcggtcagcggcgccacctcgccggaccagaagatcagcggcgtcggcaacttcgagcagttgctcaacctcggcgccgccgaccaggagccggacgccaacgacgcgcacatcgtcaccatcgtcgactggctgttccagtacgccttccagcagcgcgccagcgacatccacatcgagccgcgccgcgagcagggcaccgtgcgcttccgtatcgacggcgtgctgcacaacgtctaccagttcccgccgcaggtgaccatggcggtggtcagccgcctgaagtcgctgggacggatgaacgtggcggagaaacgcaagccgcaggacggccgggtcaagaccaagaccccggacggcgccgaggtggagctgcgcctgtcgaccctgcccaccgccttcggcgagaagatggtgatgcgcatcttcgaccccgaggtgctgctcaagagcttcgaccagctcggcttctccgccgacgacctgcgccgctggcagagcatgaccagccagcccaacggcatcatcctggtcaccggccccaccggctcgggcaagaccaccacgctctacaccacgctcaagcaactggccaccgatgaggtgaacgtctgcaccatcgaggacccgatcgagatgatcgagccctcgttcaaccagatgcaggtccagcacaacatcgacctgaccttcgccagcggcgtacgcgccctgctgcggcaggacccggacatcatcatggtcggcgagatccgcgacctggagaccgccgagatggcgatccaggcggcgctcaccgggcacctggtgctctccaccctgcacaccaacgactcccccacggcgatcacccgcctgctcgaactgggcgtaccctactacctgatccgcgccacggtgctaggggtcatggcccaacgcctggtgcgcacgctctgcccgcactgcaaggcgccgatgcaactggcggacagcgactggcacgaactgacccgcccctggagcgccccgccgcccagcggcgcgcaccaggccgtgggttgcctggagtgccgcgacaccggctatcgcgggcgcgccggcgtctatgaaatcatgctgctcagcgatagcctgaaagaactgatcaccgccgacaccgacctggtcgccctgcgccgccaggcgtacaaggaaggcacccgcagcctgcgcctgtccggcgcgcagaaggtcgccgcaggtatcagtacgctggaggaagtactgcgggtgaccccgcagagcgaacagaagtagcggcacatcccgtcggcggagttccgacggttgcacggcacaacgccggacgggcctgccaggcccacagacaaggatgtagacgatgacgagcgttccccccgccgtccccgcgccgacgctccccagccgcggcgcaccgcacctgcggcgagccgcgagcggcgtccctggctcgatgtggctcggccggccgccgagccggcgctgagggccggccgatggaaatcctgctgctacgcctggacttctgggactggctggccttcggtaccgtcctcctgctcctggaaatcttcggtgccggcggctatctgctgcgggtcggcctcaccgccgcttgtgtcggtgcgctcggcgcgctcctgccgggactggcctggccttggcaggtagggctgttcgtcctgctctccgggctggtcgccgccttgcatcggcgccgtcgccgcaaggccggtagcgtcgaggaaacgccagggttgcagcgacgcggcgacgacctgttcggccgcacctttcccttgcaccgggcgatcgtcggcgggctcggcgagctgcgcgtcgaggacgcgtcgtggctggtcagcggtcccgacctgccgcgcggcgccctggtccgggtcaccggccaggacggcgccctgctgcacgtcgagcctgccgcgccctgaatcgctgtagctcccggccggcgggggctgtacggcagcggaaaaagcgaccggacggtcatccccgctggaactccgggacggcaaacgcgatctgatgtaacacgcagccccctatcaggagttcccccatgcgttccgtcaaactcgccgccgccaccctggtcatcgccgccctgccgctgggctcggccatggccgataccttctggcgcaacatcatttcctcgggtgccaccacggcctccacctacctgaccttccgccacgaccacaagctgatcgtcgccgcgcaggacgacgccggcagctacatcgccagcgacggcgcgatccgcgggccgtacctggaagccgccctgcagaagctgcgcaacgacaacccggacctgcaggccagcgacatggaactggccagcgcgatcctcgccggcggcgagcagtccgccgtccagcagtaggccacggcgacctcgcctccgcccggaggcgaggtcactcgcggtagtcgtccagcggcacgcaggcgcagaacaggttgcggtcaccgtagacgttgtccacccggttaaccgccggccagtacttgaacgcccgcgcatgttcgctcggggtcaccgcctcggcgatctcgtagggtctctgccagatcccggtgacgtcggccagggtatgcggcgcccgtttcagcgggttgtcctccgccggccaggcgccgctctccaccttgccgatctcggccctgatgctcagcatcgcctcgacgaaacgatccagctccgccttcgactcgctctcggtcggctccaccatcagcgtgcccggcaccgggaaggacatggtcggggcgtggaagccgtagtccatcaggcgcttggccacgtcttcctcggttatcccggtctgcgccttgagcggtcgcaggtcgaggatgcattcgtgggcgacgcgctcgttgcgcccgcggtagagcaccgggaacgccccgtccaggcggttcgccaggtagttggcggagaggatcgccacctcgctggcgtcggccaactgcgggcccatcatggcgatgtacatccaactgatcggcaggatgctggcgctgccccagggcgccgcgctgaccgcgtcgttcagcgggttcggcccttcgacgcggatcaccggatggttggcgacgaacggcgccaggtgccgcttgaccccgatcggccccatgcccggcccgccaccaccatgggggatgcagaaggtcttgtgcaggttcatgtgcgagacgtccgcgccgatgtccgccggtcgcgccaggccgacctgggcgttgaggttggcgccgtccatgtagacctggccgccgtggcggtggaccacttcgcagatctcgcctaccccctcctcgtagacgccgtgggtcgagggataggtgatcatcaggcaggacaaccggtcgcccgcctcggccgccttgaggcgcaggtcgtcgaggtcgacgttgccgcagggatcgcactcgacgatcaccacccgcatgctggccatgatcgccgaggccgggttggtgccatgcgccgatgcggggatcaggcagatgtcgcgctggctatcgccgcggctctggtggtagcggcggatcgccagcaacccggcatattcgccctgtgctcccgagttcggctgcatgcagatggcgtcgaagccggtgatcgcccgcagccaggcttccagttcgtcgatcatccggcgatagccctcggcctgctcgcgcggcacgaacggatgcagttcggcgaattccggccaggtgatggggatcatttcgctgctggcgttgagcttcatggtgcaggagccgagcgggatcatcgcctggttcagcgccaggtccttgccttccagctggcgcaggtagcgaagcatctcggtctcgctgtggtgggcgttgaacaccggatgctgcaggtaggccgaagtgcgttgcaggaccgccgggatgccgtcggccaccgccccgccatccaagtgcgcgacatccagcccgtggccggcgccgaggaagatctcgaacagggtcgccagggtcgccgcgtcacaggtttcgtcgaggctcagggccagccgccggtcgtcgaccacgcgcaggttgacccgtgccgcccgcgcccgttcgaggatcgccgcctgacgctcgccgacctcgtaggtcagggtgtcgaagaagtgccggttgagccgccgcagtcccttgctttccaggcccgccgccagcagcgcggtcaggcgctggacgcgttgggcgatgcgtttcagctcctgtggcccatggtagacggcatacagcgaagcaatgttggccagcagcacctgggcggtgcagatgttcgagttggccttttcccgacggatgtgctgctcgcgggtttgcagggccatgcgcaacgccgggttgccgcgggcgtcgcgggaaacgccgatgatccgccccggcattgcccgcttgtacccttcgcgggtggcgaagaacgccgcgtgcggcccgccgtagcccatcggtacgccaaagcgctgggcgctgccgagcaccacgtcggcaccgagttcccccggcggggtcagcaacaacagggcgagcaggtcgctggcgacgcaagccagcgcctgttggccgtgcaacgcctcgataagcgggcgcaggtcgcggatctcgccgcgactgtccgggtattgcagcaaggcgccgaacaccgcgtgggcggcaagattgtccggctcgtcgacgaccagctcgaaaccgaacgcctcggcgcgggtacgcaacaccgaaacggtctgcggatggcaatgcgcatcgacgaagaaccggttgctcctggcctttgccacccgcctggccagggccatggcctcggcggcggcggtggcttcgtcgagcagcgaggcgctggccaggtcgagtccggtgaggtcgatggtcagttgctggaaattcagcagcgcttccaggcggccctgggcgatttccggctggtagggcgtataggcggtgtaccagccgggattctccagcacgttgcggaggatcaccgacggcgtcacggtgccgtagtagcccatgccgatcaggctggtccagcgctggttgagcccggcgtagccgcgcaggcgcgccagggcggcctgttcgtcgagcgcagcgggcagttccagcggccggttgaggcggatcgccggcggcaccgtctgcacgatcagttcggcgcgagtggaaactccgaggaagtccagcatggcctgctgttccgcaggatcggggccgaggtggcggcgcaggaaggcatcggcgggctggagctgggcgagggacggcgtctgcgacatggcttcggtctcgttgggggcggcatcgccctgccagcgatcgtcgccgaacggatatcgaatgagaaagcaacgacggcgaaaacgcatttcgccgctgcaaaaagaacaaagcctcgaatgatcgaggccttgtccaaggatagcgggttttgtcgcgactacgcggcggctcagccttccgcgtcgacggcggcctggtagccagcggcgtcgagcagcttgtccagctcggccggattgctcggcttgagcttgaagaaccaggacgcgtacgggtcgttgttgacgtcttccggggtgtcggccagggcttcgttgatggcgatgacttcgccgccgatcggcgaatagatgtcggaggcggccttcaccgactcgaccacgcccgcttcctgcccggcggcgagggtcttgcccagctccggcagctcgatgaagaccacatcgccaagggcttcctgggcatggtcggaaatgcccacggtaacgctgccgtcggcttccaggcgagcccattcgtggctctgggcgtaacgcagttcggcgggaatattgctcatcttgttttcctcgaagtcgggggcgacggcggtcgccattgccaggttagatcaggggcttgccgtgacgcacgaaactgggctggaccacccgtaccgggtaccacttgccgcggatttccacctcggcgcggtcgccggtggcggccggcacgcgggccagcgcgatggacttgttcagggtaggcgaaaagctgccgctggtgatctccccctcaccaatgccagctacccgcaccacctggtgggcgcgcagcacgccgcgctcctccagaaccaggccgaccagcttcggctggtcgccggcggccttctgcgcttccagcgcgcggcggccgacgaagtcccgcgcaaccggctcccaggctacggtccagcccatgttggcggcaagcggggaaacgctttcgtccatgtcctggccgtagagattgagcccggcctccaggcgcagcgtatcgcgcgcacccaggcccgccggggagatcccggcgccaaccagctcgttgaggaaacccggcgcctcggcggccggcagcatgatttccaggccgtcctcgccggtgtagccggtgcgggcgatgaaccagtcgccctcggcacggccctggaacggcttgagttcgcgtatcagtgcggcgcgtgccggggacaccagttcggagctgtgcacgcgggcgttggggccctggatggcgagcatcgccaggtcgccgcgttcctgcaggtcgaccttgaagccggcggcctgcgcctgcatccaggcgatgtccttgtcgcgggtggaagcattgaccaccacccggtagccgtgctcggtcaggtagacgatcaggtcgtcgaccaccccgccctcttcgttgagcatcgcgctgtagagcgccttgccggtttcgccgagacgcgccacgtcgttcgccaggagatgctgcagataggccgtggcctgctcgccggcgacgtcgaccacggtcatgtgggacacgtcgaagacgccgcagtcacgccggacctgatggtgctcctcgacctgcgaaccgtagtgcagcggcatgtcccaaccgccgaaatcgaccatcttggcgccgagcgcgacgtgcagctcgtaaagcggggtgcgcaatcccatgggtattctccttccgggcgtagcgggtgccgtcggcagggaccgccggcacgaaatcgcgcgcattgtagccgcaagccccggagcaggacaccatggaagcgtgccgcgatccgtgcatagaccctacgacctgcatggatactgggctcagcgatctgaatgatgggcagaacgacgaatcaacccgaccaccggtagcaggccgaccagcaccagggtcagggccggcagcgaggcgcgcgcccattcgccctcgctggtcatctcgaagatccgtacggccagggtgtcccaaccgaagggacgcatcagcagggtcgccggcatctccttgagcacgtcgacgaagaccagcagcgcggcgctcagcgaggccggcagcaacagcggcaggtagacccgcaggaacagcagcgggccgcccacgccgaggctgcgcgaagcttccggcagcgacgggcggatccgcgccagcccgctttccagcggcccgtaggccaccgccatgaaacggatcaggtaggccagcagcagggcgaacagactgcccagcagcagcggcttgccggcgccgccgagggcgctggaaagcgggatcacccagtgattgtccagccagctgaaggccagcatgatcgaaaccgccaggaccgagcccggcagcgcataaccgaggttgcccaggcccaccgcgccgcggatagcgcgggtcggcgccaggcgcacggcgaaggccagcagcagggccacggcgaccgtcgccagcgcggcgatgccgcccagcgtcagggtatggccgatcaggtcccagtagcgctcgtcgaggtcgaaacggccctggcgccagaaccagacaaccagttgcgccacgggaatcacgaaggcgcagaggaacaccagcccgcaccaggcgctcgccgccagcgccctggcgccgcgcaggcggtacagcggcgcgccgcgcggacgctcgctggcggccttggctcggcctcgcgtgtggcgctcgccgagcagcaccaggcataccccgagcaacaacaggctggccagctgggcggcgctggagaggctgtagaagccgtaccaggtcttgtagatggcggtggtgaaggtgtcgaagttgaacaccgataccgcgccgaagtcggccagggtttccatcaccgccagcgccaggccggcgccgatcgccggccgcgccatcggcagggcgacccgcaggaacgcctgccagggcgacaggccgagaacccgcgcggcttccatcaggcccttgccctgggcgatgaaggcgctgcgcgcgagcaggtagacatagggatagaacaccagcaccaggaccaggatcaccccgccggtggagcgtacgcgcggcaaccgcaggccgctgccgagccactcgcgcagcaggctctgcaccggtccggcgaaatccagcaggccgacgaagacgaacgccaggacgtaggccgggatcgcgaacggcaacatcagcgcccagtccagccagcgccgcccggggaattcgcagaggctggtgagccaggccaggctgaccccgagcagagtcacgccgatgccgacgccgagcaccagggtcagggtgttgccgagcaggcgcggcaactgggtatcccacaggtggctccagatttcccggtcgatctccagccagctcagcagcagcacgctgagcggcagcagcaccagcgcggcaacggtgaaggtgatggggtaccagcggcggggagcgggatgggccacgaaatcctcggtgcggaacgaacgacgccccgctcggacgagctggggcgtcgagtataaccggcggtcagttccagccggcgcggtccatcaggcgaatcgcctcggcctggcgcttgccggcaacttccaccgggatgctgtcggccttgaagctgccccagctggcgacttcggctgacggcgcgacctgcgggttggccgggaattcctggttgatcccggcgaacagcgcctgggcgtcgggcccggtcatccattccaccagcgccttggctgcctcgggatgcggcgcgtggcgagtcaggccgatgcccgacaggttgacgtggacgccgcggtcggcctggttcggccagaacagcttgacccgcaggttcgggttctgcttgtgcaggcgcccgtagtagtaggtattgacgatgccgacgtcgcactggccggcgtccaccgcctggatcaccgcgttgtcgtcggcgaatacgtcggtggccaggttgttcacccagccctggaggatttcctcggtcttctgcgccccgtgggtctcgatcagggtcccggtcagcgactggttgtagaccttcttcgccgtgcgcaggcacaggcggccttcccattgcttgtcggccagggcttcgtaggtgctcagctcttccggcttgacccgctcggtggagtagacgatggtccgcgcgcgcagcgacagtccggtccagctatcggtgctggaacgatactgcgagggaatgttccgttcgatggtggccgacttgaacggttgcagcaggcccatctgctcggcctgccagaggttgccggcgtccacggtgagcagcaggtcggccggggtgttagcgccttcggccttgatccgcgccatcagcggcgcttccttgtcggtgatgaacttgaccttcacgccggtcttgctggtgtaggcatcgaacaccggcttgatcagctcgtcgatgcgcgaggaatacaccaccacttcgtcggcggcctgggccaggccggtgatgcccagggccagggcggcgagtagagctttgcttgcctgcatgaagaacagcctcgtcagcggaacgtaggcacgaatgataagaaatctcgcttgcgaacccgcgcgactaaatgtgtcggggtgtttcgcctgcgtccaggccaccgaggatggcgaggaacgcctccaccgcggcgctgcggccatggcggcgggtgaagacgaggaaatcggccagcgcctcgggctcggccagcgggcgatagacgactccggcccgggccagcgcggtgctgcaacgcggcaccagggcaacgccctggccggccgcgaccagggcgatgatcgaggtgatctggcgtccggccggtcccctcgtcagcgccagcccggccttccggtagaggcgctcgatcagttcgttgaggccggagccgtagtccagtggaaacaggatcagcggccgatcacgcagatcgtacaggtcgatccgctcttgccgcgccagcggatcgccgttgggcacggccaccaccagcggctcgccgcccagggccagcacctcgatgccgacctggccttccggcggcggcaggcgccccagccccacatcgatgccgccttcggcgatctgcgcccattgcgccgccgaagcgccttcgagcagctccagctgcacctccggatggcgctcgcggaacagtcggatcgcctcggtgaacaggtccgacagggcgatggagctggcgtagccgagggtcaggtggccggccagcccctgcgccagcttgcgggcgaagccggcggtgcgctccagttggtccagcagggcgcgtgcgtaaggcaggaacaggctgccctcggcggtgagggtcaccgcccggctggagcggtcgaacaggcgaaagcccagctcttcctccagcgcggatatctgccgggtcaagggcggctgcgccatgtgcaggcgctgggcggcgcggccgaaatgcagggtttcggcaacggctgcgaagcagcgcaggcggcgtaggtcgagcatgcggttcctcggtatcgatcggtcctgaatcggtattggccagcccgtcgggagcgcccctataacagggggtttctcgtccaggcagagcgttccatgaattcgtcccagggtttcccccgcctcacgctgtttctctgcggttgcgctgcgttcctcaatctctataccacccagggcatcttcgacgaactggcggcgagcttccacatcagcgcccatcaatcgaactggagcatcaccgccaccaccctggcggtggctctcgccgcgcccttcgtcggtcgactcagcggcggccgcgagcgcagccgggtgatcgccttcgccgccagcctgctctgcgtgcccatgctgctggccgcccatgccggcagcttcgccgccttcctgctctggcgcttcgccgaagggatgctgattccgctgctgttcgccagcagcgtggcctacatcggcgagcgctggagcggcggcgcggtcatcgagctgaccagcctctatgtcgccgggaccatccttggcggcttcgccggacgcttcctcaccggcctgctgaccgaggagtgggattggcgcgtcgccttccggatcctcgccgggctgaccctgctcatcgccgtcgccatccgcgcgctgctccctgccaattctggcaggcactcgcccgcacccgggaaacgccccttagtatcccgtgaactgttccgggctccgctgctgtcgtcctacgcggtggggttctgtgtcctcttttcccaggtcgccatgttcacctatatcggcatccatctcagccgtccgccgtacagcctggacaccgctcagctcggctcgatctacgcggtgttcctcctcgccctgctggtgattcccgccagcggccgcctggcccgcacccgcccgcaccgccagttgctgctgggcgcatcgctgctgggcgtgtgcggctcgctgctgaccctggcgccgggcctgccgacgattctcgtcggcctggccctcagcgccaccggcgtgttcctcgcacagtccacggtcaacgccttcaccgccagcaatgccgggaccgacaaggccggtgccgtcggcctctacctgacctgctactacgccggcggcagcctcggcgcggtactgccggcgccattctgggagcgctggggctggccgggctgcctgggcctgatcctcctggcccagttgctgccgttgcttctgacccgctacggctggtccgcaccacaggccgaacgcgcggccctgcgcgcgtcgcaaggaagaccgtaaccatcgcaagaacaacaagaaccgacaggaggttagccatgaaccatgtcatcaccccccacagcaagctgctcggcgtcatcgagccggtcctcaacgacatgcccgccggaaccctgcgccacgcactgttccgggccttctgggacgagacggcgtcgttgctggacatcgaggacgccttcgcccgggtcaccgcccggcgccaggcggtcgagccgctgcgcaagttcttcgccagctggtcgaagaccaacaactcggcggccagcgtttccggactggccaatcgcctgaccctgctggcccgttcggaacagggttcggcagcggcagaccagctctatcgagcctgcggcagcctgcaacggatcaccgacgaagacctcggcgccctcggcaacaccgtgcatgccgatcttttctacaccatggccaccaccctttgcggcgacgaccgctggctgctgcgcgagaactgcctgccttcggcgcaggcgttcaaggactggaccgaccgccagcgcctgcgtgagcgcgacctgatgcagggactgctgaccacgctggtacacgaggtctatacccacggcgaggtggagtacatccacccgctgtacaaggaatggttcagccgcgacatgggcgtacccgccgaacgcgcccgcgccaccgtggcctgggtaacggtgcacaccggcggcaccgagagcaatcacttagcccacgccacggcggcggtgaacgccttcgtcgaggcgatggaaatcgaggtgaacgaagaagccgcgcgcaacctgttcgggctctacctgcgcaacaaggcgcaggtcatgcgtgactgcgcggcgctgttctgaggactggcggccctcccgtcaggggggccgccccgctcagactcgtgccagcgacggcaggtcgccgctgaggccaagcgcctggcggacgaacagcgccttcgcctcgtgatggccgtcgaccaggcgcaggccggcgttgcgcagccagcgcagcggcaaccggtcggcctggaacaggcgctcgaagccttccatcgccgtcatcatgcccaggttgtgcggcatccgccgccgctcgaagcgactcagcacgcgttcgtcggcaagccgttcgccgcgctccagggcgtgcaacaggacctcggacagcaccgccgcatcgaggaagcccaggttcacgccctgtccggccagcgggtggatggtgtgcgcagcgtcgccgaccagcgccaggcccggctcgacgtaacgcttggcgtgccgctggcgcagcgggatgcacaggcgccggtcggcatgcaggatggcgcccaggcgctgttcgaaggcttcgccgagggcggcgcggaagccatcctcgtccaacgccatcaggcgttctgcctgttccggggtggtcgaccagacgatcgagcaccagtgctcgtcgccgcggtccggcaggggcaggaaggccagcggaccgtcgtcggtgaagcgctgccaggcggttgcgcggtgcgcgttctcgcagcgcacgctggtgacgatggcgtggtgcaggtaatcccattcgcgggtggcgcagccggccaggcggcgtaccgccgagttggcgccgtcggcggcgaccaccagcggcgcacgcagctggcgaccgtcggccagggtcagcagccagtcgtcgccggagtggcgcatctgttccaggcgcgcattggccagcaggccggtggtggaatcgtgcaggcgttccagcagggcgtcctgcaccacccggttctcgacgatatggccgagtacctcggcgtgcacgctggcggcgctgaagccgatccgcccggtgccggagccatcccacacctgcatctcgcgatagggctcggcgcggcgcgcgacgatgccgtcccaggcatgcaggcgctggagaatccgccggctggcttcggacagcgcgctgacccgcggctcgtagggcgcctccggcttgaacggcgccacgtcgagcgagccgccgtccaccagcagcacctccaggccgctgccctccagggccagggccagggcgctaccgaccatgccggcgccgacgatgaccagatccgcgtgcatatcctcgttctccactcgtgggccctcttcaggccgcgttccgcaggcgcggcttgagccgcacgtacagggttttctgaacccgcgccaccagggtgccggcgtcgtcgcgcacttcggcgtgcagccggggcaggtacttctcgccgccggcggtccgctcgcggacctcgtcgagcagcttctggtcgatgctgaaatgcgcatgcaccgggcccttgcccgggctgacgaactcgatgttggccgccttgtcccagaccacgtagtcgcggcccaggttctccatcagcatcagcatgaagaacgggtcggtcatcgcgtagaggctgccgccgaactgggtgcctacatagttgcgattgagccggttcaggcccatgcgcacccgaacctcgcggaaatcgccagcgatgtgccgcacacggatgcccgcccccaggaagggcgggtagagattcatggcgaagcgcagcaggcgggccttgcgcgccctcgaccagaccggcatggcgctacagcggccgcgcgccgaggcccatggcctggcgggcgaaccagcgcttggccggcggcagcaggtcgagcccgagcaggccgaggttgcgcccggcgccgagcagcgcgcggtcgttggagaacagccgggtcacccggtcggagaagccgacggtcatctgctggtccaggcgctgcccatcgaggtagcgctgcagcacggcgaactcgcccagcggcgcgtcgtcgtggagcagggcgtcgaccagcgccagggtgtcgcgcaacgacaggttgaagccctggccggcgatggggtgcagactgtgcgcagcgttgcccagcaccaccaggtgcggacgcacctgctcgcgggcctcgaccaggtgcaaggggtagcagtgccgtgcgccgacctggcggaaggcgccgaggcggtagccgaaggcagcctgcagctcgccgaggaaggccgcgtcatcgaggccacgcaggcgttcggcgtccttgcctgggcgggtccagatcagcgcgcaacggttatccggcaacggcagcagggccatcggaccgctgggggtgaagcgctcgaaggcctgcccgaggtgcgcctcggagggcgatacgttggcgatcagcgcagtctgccggtacggcgtctgctccacggcgatgccgagttgttcgcgcagcccggaacgaccgccatcggcgaggatcgccagctcgcaatcgagttgcgtctcgtcgtcgagggtaagccggtaaccgccctcccgggcttccagggtcttcacttcggccgggcagtgccagcgcaccacctcggggtcgagcgccttccacaggcactggccgagccaggcgttctccaccacgtagcccagcgccggcacgccttcctcgatggcggtcaggcgggtggcgccgaagcggccgcggtcggaaacatggatatgcaggatcggctcggcccgctcggcgatcgccggccacaggccgagtcgctcgtagatctgccggctgccgtaggacagcgccgaagagcgggcgtcgtagctgggctggtaggcgttgccgggggcgaagggttcgatcagcacgatcgaccagccgcgctcccgagcgccggcctgcagggccagcgccagcgaggcgccgaccaggcccccgccgatgatcgccaggttgaccttgctcatcgtcacctcaggctgcctcgctcttggccgcggccatcagcgcctcgatctcggcgacggtcttcggcacgccgttggtcagcacttcgcagccattgcgggtgaccaccacgtcgtcctcgatgcgtacgccgataccgcgccacttcttcgccaccgtggtattgtccggggcgatgtagatgcccggctcgacggtcatcgccatgcccggttcgagcacccgccattcgccgccgacgcggtactcgccgacgtcgtgcacgtccatccccagccagtggccggcgcggtgcatgtagaaagccttgtaggcctcgtgggcgatcagctcgtcgacgtcgccctccagcaggcccaggcgcaccagcccggcggtgatgacccgtacggtggcctcatgggcctcgttccagtggcgaccgggggcgatgtagtcgaacgccgccatgttggcttccagcaccagttcgtagatcgccttctgctcgggactgaagcggccattggcggggaaggtacgggtgatgtcgctggcgtagcagtcgatctcgcagccggcatcgatcaggatcaggtcgccgtccttgatcgccgcatcgttctcgcggtagtgcaggatgcaggcgttgcgtccggcggcgacgatcgagccgtaggccggcatcttcgccccgcccttgcggaactcgtattccagttcggcttccaggtggtactcgaacagccccggccggcacacctccatcgcccggatgtgcgcccgggcggagacctcggcggcgtagcgcatgaccttcacttcgttggcgctcttgtacagccgctggcgtgcagcaggtggtcgagggcaacgaactcgttcggcggctgcgcgccctggcgggccttggagcggatcacgttgatccagtccatcagccggcggtcgaagtcgggattggcgccaagggcgtagtagacccggtcgcggccttcgatcaggccgggcaggatgtcatcgatatcgccgatgggaaaggcgtcgtcggcgccgtactggccgatcgcaccgtcctggccggcgcgcaggccgtcccacagttcacgctccggatcccgctcgcggcagaaaagcacgtattcgccgtgggcacggccgggaatcagcgccatcaccgcctccggctctgggaagccggtgaggtactggaagtcgctgtcctggcggtagacatgctcgacgtcgcgattgcggatgtacatcggcgccgccggcaggatggcgatgctgttgggttccatctgcgccatcagcgccttgcgccgacgggcgtactccgacttggggatacggatcatgcagaaacctcagtgcagtgaaggcttgggagcgggctccagcggcttgccgcactcggcgaacagcagcagcggagcgacccgcaggtattccatgacttccatatagtccgtctcgccgtcctcgctgtcttccagctggccctggacctgggcgatggcggccatgtcctgcagcacttcctcggcttcgccggtcaggctgccttcgcgggcggtgaggccgaaaccggcgaggaaaccctggcaccattggccgagcgcctcggtgcgctgggcgagcggggtttcgtcgtcgggcaggagcatgacgacggcgacctcgccggcggaaaagtcctgccggaccatgccgagcaggccggacaacgcggccttgagtcgttcgcccggcgcgccgccgagcagttcggcggcagcgtgttgccaggcggcctcgtcgaagccggcgccggcgcagacccgacccagcagatggccgtgcagttcggccggcgagaccggcatggccgcctcggcgagaagggaggaaaaggcgctgtaggcggaattctgagtggacatctcgggaccctgacggctgggcgccattggggcgctacacgtgaaatgaaggtggttatcctagcaccgcccgccccggcaagaccatgcgaccggttgccggcgcgccggcccggccggggcattggccccgaccggggacgatcctatatagttgtccaatcaccccaattcccaagcgagagcccatggaagacgccgatctgcaattgttgacggccaagttcgaccagctgctccagaagctggaacagctcaaggcggagaaccggctgctgcgggcgaacgaaaagtcctggcgcgaagagcgcgctcatctgatcgaaaagaacgaaatggcgagacacaaggtcgaagcgatgattttgcgtctgaaagccttggagcaggacacatgagccagtcgaataccctcaccgtgcagattctcgacaaggaatactgcatcaattgcccggacgacgagcgcgccaacctggaaagcgccgcccgttacctggacggcaagatgcgcgagatccgctccagcggcaaagtcatcggcgccgaccgggttgccgtgatggccgccctcaacatcacccacgacctgctgcaccgcaaggagcgcctggaccaggaaagcagctcgacccgcgagcgcgtgcgcgaactgctcgatcgcgtcgaccgcgccctggcgaatccggccgatgccggcgaagcctgacccgggcgcggccaattcgggtatactggcctccgctccctggtgtgttggccagtcggtgatgtccctgagccgataactgcaacaacggaggttgccagttggaccggtgtgcatgtccgcacgacggaaagccttaaggtctactgcaaccgccaccttgaactttcgggttcaagggctaacccgacagcggcacgaccggggagctacctttccacatgatcgaatcgcaagacctcagccgcccggccctgcgccgcaagctccgccaggcgcgccgcgcgctctcccccctgcagcaacgcctcgccgcccgcgccctctatcgacaactggcgcagcatccccttttccgccgtgcccgccatatcgccctgtacctgcccaacgacggcgagatcgacccgcgtccgctgctgcgtgcggcgcagaagcgcggcaaggccacctacctgccggtgctggcgccctggccgcggacgcgcatggtattccagcgggtcggcagcggcgaacgctggacccgcaaccgcttccgcatcagcgaaccgctggccgacgccggccgccagcgcaaggcctgggcgctggacctggtactgctgccgctggtggggttcgacgaacagggcgggcgcctgggcatgggcggcggcttctacgaccgcagcctggcctacctggcgaggcgcaaaaatggtcacaaaccgacgctgatcggcctggcccatgaatgtcagaaggtggatcgactggcgctggccagctgggacattcccctggcgggaacggtgaccgatgcgggctggtacgtggcagggaaacgctaggaaggagggagaaccctgggtaccgcgttccatgcgatacccggcgagtcttacggctgttgcgtcacctgggcgggcgtgctggcctgtcgttcccagaggctctgggtataaccggtggtgacgaccccaagtccgaagatgatgaccaaaacccacagcaagtctggcttgcgcttcatcgattgcctcccccttccaggcaattttcgaggccggtccttgcgattatcttatcgcctgagcaccctgccccgctgaaaaacggcattttccgataagctgaagtcatacgcaattacaccggcgaccggtggtcacgcgcagacgtttcctacgtatatctacgaaagaggagcaaagttcatgcctgcctactggctgatgaaatccgagccggacgaactctcgatccgcgacctgcaacgcctcggaaccgcccgctgggatggcgtgcgcaactatcaggcgcgcaacttcatccgcagcatgaactccggcgacctgttcttcttctaccactccagttgcccgcagcccggcatcgccggtatcgcccgcatcgaaggcgaagcctaccccgatcccacggccctggatcccgccagcccctaccacgaccccaaggccagcgccgggaagaacccctggagcgcccgcgacgtcagcttcgtcgaagccttcgccgaggtcgttccactggcccggctgaaggcccaggacgccctggccaacctcgccctggtgcagaagggcagccgcctctcggtaatgccggtcagcgccgaggaatggcaggcgatcctgccgctggcgaaacgctgaagccatcgctcaggccatctgcgagatggtccggcggaaacgccagagcgcgccgaagaagaacgccgaaccgatcaccacgataccggcgaactgcggccagacgatgtcgaaaccggcgccgcggaacaggatcgcctgggccaggctgacgaaatgcgtggtcggcgccgccagcatgatgttctgcaccagttccggcatgctttcccgtggcgtggtgccgcccgaaaggatgttcagcggcagcagcacgaggatggtcaacagtccgagctgcggcatcgaacgcgccaccgtgccgaggaatatgcccatggaggtggtggcgaacagatgcaatccggcgccgagcaggaacagtcccaccgagccgctgatcggcacgtccagccagccacgcaccacccactgcaacgagagccccgccgccaccagcaccaccagccccatcgaccagaccttggccatcatgatctcgaaggccgacagcggcatcaccagcaggtgctcgacggtgccgtgctcgcgctcgcggatcagcgcggcgccggtgaggatgatcgacagcatggtgatctggttgatcacttccatcaccccgccgaaccaggcctgggtcaggttcgggttgaattccatgcgcacctcgatctgcgccggcatgctcggctccgcgcggtagcggctgacgaattcgcgcacctcggtggcgacgatgttctggatgtagcccgcgccggagaaggcctgcccggtctgggtcgcgtcgacgttgacctggatcgagggcttgcgcccggcgagcacgtcgcgctggaagtccggcgggatatcgagggtgaaggtatacaggccgacgtccatgccgcgatccatctcggcatgcccgatcatttccggcggccggaagtatgggggctggaaggcattgacgatacgcgacgagagctgcgagcggtcctcgtcgaccaccgcgatcggcgcgtgatgcaaggtttccggaataccggtggcggaactgtagacgcccagggtgaaggcccagacgatcagtgccagcatcgcgtagtcgcggccgagactgcggaactccttgatgcccaggttgaagatgttggccaggctgcgcatcgctcagtcctcctgcttcttcaggcaggccacgctgagcagggtcagcaccacgatggaagcggcaagcggcaggtagtaggcccagagatcggacagtcccagcgatttggaaaaggcgccgcggctgaccaccaggaaatgcgaggtcggatagagcttgccgatccaggccgccgcaccttccagcgaggacaccgggtggatcagcccggagaactggatcgccgggatcatggtggcgatcgccacgccgaatacagcggcgatctggctgcgcatgaacgtcgagaggaacagccctaggccagtgctggtgaccacatagaggaaagcgccgatggtcaacgccaggaagctgcccttgagcggcacgcgaaataccacgatggccaggaccagcatcagcaggaagttgatcatgcccatggcgacgtagggcagctgcttgccgaccaggaactccaggcgcgtcaccggggtgacatagaggttggtgatcgaacccagttccttttcgcgcaccacgccgagggcggtgagcatggccgggatcatgatcagcagcagcgggatcaccgccggcaccatcgccttcaggctttccacgtcggggttgtagcgatagcgcacctcggtgctggccgccgcgctgacctcggccccacccgcctgccgcgagaggtccgccaggtagctggtgtgcaggccctgcacgtagccgagcacggtgttggcacgggtcggcatcgctccgtcgatccacacgccgatggccggatcggagccacgcttgagatcgcgcccgaagttcggcggaatctccaccgccaggctcagctcgccgctgcgcaggcgccggtcgaggtcgtccgggtcggtgatcggcgcatgttcgacgaaatagcgcgagccggcgatgttcagcgcgtaggcctggctggtggtggtctggtcacggtcgaggaccgcccaggagaggtcctcgacgtccatgttgatgccatagccgatgatgaacatcagcagcgcggtgccgagcagggccagggtcaggcggatcgggtcgcggcgcagctccatggcttcgcggcgcgcatagctgaacagccgcagggggctgaagcgttcgcgttgcgcctggcgctcctggccatcgccgggctgctccgcgacggccggcgcctcggccggttgcgctggcgcggcggcacccgcggcttcctccaggtaagcgatgaaggtcgcttccagggtcggcagaccacgctggcgcaccagctcatcgggagtatcgctggccagtaccttgccggcatgcatcagcgagatgcgatcgcagcgctgagcctcgttcatgaagtgggtggaaatgaagatggtcaccccgtcgcggcgcgacagctcgaccattagctcccagaagccgtcgcgagccaccgggtcgacccccgaagtgggctcgtcgaggatcaggatttccggcttgtggatcaccgccaccgccaacgacagacgctggcgaatgcccagcggcaggtcgttgggcagctcgtcggccaccttctccaggtcgaagcgccggagcatttcgccgacccgtgccgggatgccatccgccggcaggtggaacagccgggcgtgcaacaccaggttctgccgcacgctcagctcggcatacagggaaaaggcctgggacatgtagccgacccggcgacgggtcgccatgtcgctggcgtccaccggctggccgaacagcgcgcacgtgccttcgctggccggcagcaggccggtgagcatcttcatggtggtggacttgccgcagccgttggagccgagaaagccgaagatttccccacgctcgatacggaagctgacgtgatcgaccgcgacgaagtcgccgaaacgacaggtcaggccctcggcctcgatggcgatccgcggcgcgccttcgctctgcggtcgcggcgggatcaccaatcgatggtggccggcgcgcttgctttccggcagcagggcgatgaacgccgactcgaggctctgcgtcccggtacgctcgcgcaactcctgcggcgtaccggtggccaggacctttccgtcgtccatcgccaccagccagtcgaagcgctcggcttcctccatgtaagcggtggcgaccagcacgctcatgccttcgcggcccgcgcggatacggccgatcagctcccagaactggttgcgcgacagcgggtcgacgccggtggtcggctcgtcgaggatcagcaggtcgggatcgtggatcagcgcgcagcacagcccgagcttctgcttcatgccgccggacagcttgcccgcaggacgctcggcgaacggcgccagcccggtgctctgcagcaggtcggcgatgcgccgctcgcgctcggccttgtcgtggccgaacagccgaccgaagaagtcgacgttctcgaacaccgagagcgtcgggtagaggttcttgcccagcccctggggcatgtaggcgatgcgcgggcagaccgcccggcggtggcggcggtcgcgcatgtcgccatcgagcacgcggatctcgccatcctgcatcttccgtgcgccggccagcagcgccagcaggctggacttgccgaccccgtccggaccgatcaggccgaccatgcggttggccgggatctccaggctgacgtcgtcaaccgcgcgcgtctcgccgtagcgcagcgaaacgccccggaggctcgccacgccgctcccgccagcggtcattgcggaaccttgatctgcaggttggccggccactcgacctcagggtccagtcgcaggtaggccattccgggcacgccggtcttgacgtaggtgatgtatttttccagcagcgccggatcgagccgcgccttgacccggaacatcagcttctcccgctcgttggcggtttccaccgttttcggggtgaactgggcgacgctggcgacataggaaaccttggccgggatcacgtagtccggcaccgcgtcgatcaccaagcgcacttcctggcccagtccgaccctgccggcctgcatggatggcaggaagaaagtcatgtagacgtcggccaggtcgaccatgttgaggagcttgccaccggccggcagcacttcccccggctgtgccacgcggtactgcacgcggccgttgcgcggcgccttgagcaggctgtcgtcgatatccgcctggagccgggcgacgctggccttggccgcctcgatggccgactgcgcctcgattacctgggaacgcccggcctcgatcgccgcctgcgccgaaatcacttgcgagcgtgccgcggacaacgccgcctgggcgctctgcagggtcgcccgatcgtcgtcgagttgctgttgcggcagggcattgcgcttgaccagcgcctcggtacgggtgaagcgcttctgcgccgctgtcagctctgcctggcgctgcgccaccacggcctgggcggtgctcttctcgctctcgcgctgggccaccagcgaggtcgcggtgagcttggcgttctccgcctggcgcacctgggcctgggcctgggccaactgcgcctcgagcacctgggtatccatccgcgcgacgatttcgccggccttgacgaagtcgccctcgtcgaccttgatctcggcgacccgcccgggaagcttggccgccacgtccacctcggtggcctcgatgcgtccgttgccgctggcgaatccctcgcccaggccggtcggtcgcgatacctgccagaccagcacgcctacgccgagcagcgccgccacgatcaaggcacggctcagccaccgtttgctttcctgtttcatcccttctcctcgcacgtccggccaggccgcggcgatggcgctcacgctgtaaagcgcggccgccgcggacttcactggctcgattgtccctccagggcggcgcgcgggtgttgatgcacgtcagacgcgcccgaccgaatctcacaggaaagcagaatcgccggtgcctcgcatccgggagcgcgggacagaacggatagttgacctcagggctggacgatgaggttgttgaacagcaggtcggtcaccagcggcttgccctcttcctgctcgagggtctgctggacctgcttcagcgcctcctggcgcaggctttccttggcctcgaccgtacccaggctctggtcggtctgctgggcgaacagcatgatcaactggttgcggatcaagggctcgtgatgctcgaccttggtcgccgcgtccttgtcggccacctgcagggcgatgtcggccttgtagtactgcaggcgcggcccgctgccgtagttgccgaccagcgccggggtcaggtcgacgtagaccggcttgttcgcgccctcgccttccggcgcggcctcctcggccgaggcgaacgacgggaacagactcaggcacagggccagcgacagggcaatgggggttctcacgggcgcatctcctcgacgaatgccggcaagcatagccagactctcggccgggcccaagcccggggtttatggacaaccatcagttgcggcgatgctgattgacccccggcgtctccctcctacactggccggaccgcaaactggagcgtccccgatgaaagccgtcctctgcaaagccttcggcccggccagcagcctggtcctggaagaaatcgccagcccgagcccggcgaagaacgaaatcctcctcgatgtgcacgccgcaggggtcaacttcccagacaccctgatcatcgagggcaagtaccagttcaagccgcccttccccttctccccgggcggcgaggcggccggagtggtcgccgcggtcggcgaaaaggtcgcccacgtcaggcccggcgaccgggtcatggccctgaccggctggggcagcttcgccgagcaggtcaaggtgcccggctataacgtgatgccgattcccgaaggcatggacttcgccagcgccgccgccttcggcatgacctacggcacctcgatgcacgccctgaaacagcgcgccaacctgcaacccggcgagaccctgctggtgctcggcgcttccggcggggtcgggctggctgccgtggagatcggcaaggccatgggcgcccgggtgatcgctgccgccagtacccccgacaagctcgccgtggccaaggccgccggcgccgacgaactgatcaactacagcgaaggtagcctgcgcgagcagctcaaggccttgaccggcggccagggcgtcgatgtgatctacgatccggtgggcggcgaactgttcgaggaggccttccgcagcatcgcctggaacggacggatgctggtggtcggcttcgccagcggcagcatcccttcgctgccggccaacctgaccctgctcaagggcgcctcgctggtcggcgtgttctggggatcgttcgcccaacgccagccgcaggacaacgctgacaacttccgccagctgttcgcctggcacgccgaaggcaaactgaagccgctggtgtcgcagcgcttcccgctggaacgggccggcgacgctatcgacgccctcggccagcgcagggcggtcggcaaggtggtggtggaggttcgctgagccacgaaggcggcgagtattgcctcccgcccgtgcggagaaaggcatggcgggccggagcgatacaccggccgaggcccacgctgtcagatgtttttccctatgaaggccccggtttccgaccggggctttcttatttccgaccaatgcactcaacctgtaacatttccgctattttttcatttacgaaaaatgtagtgttcgcaaccgcgtaaaaaggcgcgacacaacaacaagcggagctcgcgatgttcggaatctttcgtcccgcgccacaccaggcgccactgcccgatgccgaggtggacagcacctaccggcgcctgcgctggcagatcttcgccggtatcttcatcggctacgcgggttactacctgctgcgcaagaacttctccctggccatgccctacctcatcgaggacggctacagccgcggtcaactgggcgtcgcgatgtcggccatcgccatcgcctacggcctgtcgaaattcatcatgggcctggtctcggatcgttccaacccacgggtcttcctgccgttcggcctgttggtgtcggcggcggtgatgttcattttcggattcgcgcactgggctacctccagcgtcgccatcatgttcgtcctgctcttcatcaacggctgggcccagggcatgggctggccgccgagcggacggaccatggtccactggtggtcgcagaaggagcgcggcagcgtggtctcggtgtggaacgtcgcccacaacgtcggcggcggcctgatcggcccgctgttcctgctcggcctggcgctgttcggcgactggcgctcggccttctacgtgccggccatcgtcgccgtgggcgtagccgtgttcgcctatttcgccatgcgcgacaccccgcaatcctgcggcctgccgccgatcgagaagcacaaggacgactaccccgaaggctacgacgaacaccacgagcgcgagctgtcgaccaaggagatcttcgtcacctacgtgctgcgcaacaagctgctctggtacatcgccctggccaacgtgttcgtctacctgctgcgctacggtgtgctcgactgggcgccgacctacctcaaggaggccaagcacttcaacgtcgacaagtcgtcctgggcgtacttcttctacgaatgggcggggattcccggcaccctgctctgcggctggctgtcggacaagctgttcaagggcaatcgcggcgccaccggcgtggtgttcatgatcctggtgaccgtcggcaccctgatctactggctgaacccggccggcaacccggcgatcgacatggccgcgctgatcatgatcggcttcctgatctacggcccggtgatgctgatcggcttgcaggccctggagctggcgccgaagaaagcggccggcaccgccgccggcttcaccggtctgttcggctacctcggcggctcggtggcggccaacgccctggtcggctacacggtggatcacttcggctgggacggtggcttcaagctgctgatcggcgcctgcctgctggccatcctgttcctctgcctgaccctgcgcaaacccgcggtccaggccgcgccgcagcaagccggctgatgacgcggcggctccggcgccaggccggagccgcgttcagtcccgcggcgcgtaggcgaacacgtcggcgcgcatctggtgcgcatccatccctgcttcgaccagggcatccagggtcgcgtagaccatcgccggcgagccgctggcatacacatgcaggctcgacaggtcggcgaaatcctcgcgcaccgcctcgtgcagcaagccgcaacgcccctcccagccacagaggtcgctgaccacccggtgcaggaacaggttcggcaggccttcccactccgtccagtgcggcagtcggtagaaatcctccggacgccgaacgccccagtagagatgtacaggatgggcgaagccggcggcgcggcagtgctcgatcaggctgtgcatctgcgacatgccggttcccgccgcgatcagcaccagcggaccgtcgggcagctccgccaggtgcgcgtcgccgaacggcagctggatccgtgccaggcgctcgcgctgcaattgcgcgatcagcgcgacggcactgtcttccttggccaggatgtgcaactcaaggtcgcgtcccgcatgcggcgcggaggccagggaaaacgccgcgctgtcgccgccgtcacgctccagcaacaggtactgcccggcgtgatagcgtggcggcttgccggccggcgcgcgcaggccgacccggtagacgtcaccgccgacctcttcgcagaagctcaactggcaggtcagcttgcgcagaggcagttcacccggcgccagcaccccgtcccaatgcagcacgcagtcttccagcggctcagcgaggcaggtgaagagttcgccatgatcgcgtacctcgccgttctggcgtacccgcccctccaccagcagcgccgcgcagatatggcagttgccgttgcggcagctctgcggacagtcgtagccaagccgccgggcgccatcgaggatgcgttcccccggcagcagctcgaggcaggcgccggacggttgcaggacgatacgcatcagtcgatcccgaggctcgaccagagcgcgtcgatgcgccgtgtcaccgcttcgtccttgacgatggcgcgcccccattcgcggctggtctcgcccggccacttgtgggtggcatcaagccccatcttcgagccgaggccggaaaccggcgaggcgaagtcgaggtagtcgatgggcgtgttgtcgatcatcaccgtgtcgcgcttggggtccatccgcgtggtgatggcccagatcacatcgttccagtcgcgcgcatcgatgtcatcgtcggtgacgatgacgaacttggtgtacatgaactgccgcaggaacgaccagaccccgagcatcacgcgcttggcgtgccctgggtactgcttcttcatggtcaccaccgccatccggtaggaacaaccttccggcggcaggtagaaatcgacgatttccgggaactgcttctgcagaatcggcacgaacacttcgttcagcgccaccccgaggatcgccggctcgtccggcggacgcccggtgtaggtgctgtggtagatcggtttctgccggcgggtgacgcgctcgacggtgaacaccgggaagcgatcgacctcgttgtagtagccggtgtgatcgccatagggaccttcgtcggccatctcgccggggtggatcaccccttcgaggacgatctcggcgctggccggcacctgcaagtcgctcccgcgacacttgaccagctcggtacgatgcccgcgcaacaggccggcgaaagcgtattcggaaagggtgtccggcaccggcgtcaccgcaccgaggatggtcgccggatcggcgcccagcgccacggctaccggatagggctggcccggatgcttctggcaccactcgcggtagtccagtgcgccgccgcgatggctgagccagcgcatgatcaccttgttgcggccgatcacctgctggcggtagatgcccaggttctgccgttccttgttcggcccgcgggtaacggtcaggccccaggtgatcagcggcccgacatcgcccggccagcaggtctggaccggcagccggccgaggtcgacgtcctcgccctcctcgaccacttcctggcagggggcgtccttgagcaccttcggcgccatggacaggaccttcctgtacatcggcagcttggcccaggcgtccttgaggcccttcggcggctcgggctccttgagttgcgccagcagcttgccgatctcgcgcagcgcgccgacgtcctcggcgcccatgcccagcgccacgcgctccggcgtaccgaacaggttgccgagcaccggcatgtcgaagccggtcggcttttcgaacagcaatgccgggcccttggcgcgcaacgtgcggtcgcacacctcggtcatctcgagcacgggggaaatcggcacctggatgcgcttcaacgcaccgcgctgctccagctgggcgatgaaatcgcggagatccttgaacgtcattggcctaaccattcactgcaagaccccacatcctacctgctcccggcccatccggcagcaggcaaacgcggcattcggtcactgctggctggcgatcctcgagtcgtcgaggctctgtagcatcggctcgaacaaaggcccaagttcatgggccccctgggtcgaaaggtggttgttatccatgtacagcgaccagccatcacgttcggcgaaacaatccaggccatcgcagagcacgctggaggggtcgagcacgctcacccgcgggttgccttcggccaacgcatcgaacagcgcattcacgtaggcgacgcgcgcggcgtgctcagcgaagggaaaacgtgcgcgcccgacatcctccccgctcagactcagccgcaccagccgcgccggtgccttgaatggcagcagcggtacgtccttgaccagccagacatgtacgtcggccgcgttcagcctttcgatcatcccgctcaggcgttgccgcagcagcgcctcggcgatcgagctgtccggcgtgtcgtccggctcgcggagaatgttgcgggtaccgtcctgcgagtcgccgtatatatacatgtcccagcgcccggcgaggatcaccccgcccggccgctgctgttcgacgaactcgagcatctgctggttgaaacgcaggcaattgtccttttccagcatccccagcaacggcggacagcccgccagcgaagcctgccagatcggcagtcggcgactggtagccagttcgcgcagcagcgggctcaacgccgcggaatggctgtcgccccaactgaccagcagcggtcgttcggcagccagttccgccgggaagcggcagatgctttcctgactgagcgccttcttgtcgaacatgcagtcggtctgcccatcgcgccatttggacgccttggcataacgcaaggcttcctcggaaagacgcgacggcacgccgtcgtaatgccgcaccaactggccgatgactcccagcagcagcaagctgcacagcgccgcgccaagcatctgccggcgcccggcgaacagcttgcgctcgcggaacggtgcctcgacgcagtacagcgacagtgccgccaggccgatgctcgccgccagcaaccccaggcgtgccggcaggcccagggtttccagtgcgtggtactggacgaagacgtacagcggccagtgccagaggtacagcgaataggagatcagaccgaaccagaccagcggttgccagcccagcaggcggcgagcccaggtgtcgcctgcgccgttggcccagatcagcagggcggtgccaagcaccgccggcagcgccgcgaggccggggaaaggagtgtcgctgtcgtagaagaacaccggcaggagaatcgccgctatgccgagggtggccgccagttgcagggaccactgcgaatgaccgcggctagcgcccggcagcaacgccagcgcggcacccgccaggagttcccaggcgcgcatcggcaggaggaagaatgcactgccaggtcgctggctcaccgcccagacgctggccgccagcgatagcgccaggaccgcgaggaggatggcgagccgccagcgcagcaggcgcccggagatcgcggccagcagtagcgggaagagaatgtagaactgctcttccaccgacaacgaccaggtatgcaatagcggcttgaattcggacgcggcgtcgaaatagccatcctgcttccagaacaggatgttcgaggcgaacatcgtctggtaacgcaccgcacgacccagttgctcgtagtcccgcggctccatcaggaaccagccggccgccaggctgacggccatcataacgaacaaagcggggaggatgcgtcgcgcccggcgagcccagaaatcgacgaagctgaaacgcccggcctgccgatcgcgccggatgatcgaagtgatcaggtagccggaaatcaccagaaagacatcgacgccgacatacccgccggtgaaaccgcccaagcccaagtgatagaacaccaccggcaagatggccagtgcgcgcaatccatcgatatctcttcgataaggcaggctcgacatctatttttctccaggcatgaaaaaaggcgctccggtcaaaccggagcgccttcttcaattccctggaagactacttccgtttcatcgaatcgaagaactcatcgttggtcttggtctgcttgagcttgtcgatgaggaattcgatcgcggagatctcgtccatcgggtgcaggatcttgcgcaggatccacatgcgctggagctcgtcctcgctggtcagcagctcttcgcggcgggtacccgaacggttgatgttgatggccgggaacacgcgcttctcggcgatcttgcgatccaatgggagttccatgttgccggtacccttgaattcctcgtagatcacctcgtccatcttcgagccggtttccaccaacgccgtggcgagaatcgtaagagaaccgccctcttcgatgttccgcgcggcgccgaagaagcgcttcggcttctccagggcatgggcgtcgacaccgccggtgagcaccttgccggagctggggatcacggtgttgtaggcccgcgccagacgggtgatggagtcgagcaggatgaccacgtccttcttgtgctcgaccaggcgcttggccttctcgatcaccatctcggcgacctgtacgtgacgggtcggcggttcgtcaaaggtcgaggcgaccacttcgccgcgcacggtgcgctgcatttcggtcacttcctcagggcgctcgtcgatcagcaggacgatcaggtggcattcggggttgttgcgggtgatgttgctggcgatgttctgcagcatgatggtcttgcccgccttcggcggcgccacgatcaggccgcgctggcccttgccgatcggcgcgcagagatcgatgacgcggccggtcaggtcttcggtggagccgttgccggcttccatcttcatccgctcgttggggaacagcggcgtcaggttctcgaagagaatcttgttcttcgcattctccggacgatcgaagttgatcgagtcgaccttgagcagggcgaagtaacgctcgccctctttcggcggccggatcttgccgatgatggtgtcgcccgtgcgcaggttgaagcgccggatctggctcggcgagacatagatgtcgtcggggccggccaggtaggaagagtcggcggagcgcaggaagccgaagccgtcctgaagaatctccagcacgccatcgccggagatctcttcaccacttttcgcgtgcttcttcagcagggcgaagatgatgtcctgcttgcgcgaacgggccatgttttccaggcccatggcatcggacatttccagcagttcggcaatcggcttttgcttgagttcggtcagattcataggaaagagataggtacgcagaaagaggaattggagaaagcgtcgagcttgggaaagccgtgtcgcaagggggcgacaggagcgctagaaagttcgagtaggaagtgcgtccgggacggcatgcagaaggcgacggaaaaaacgtcgcgaacccgaatttaacaccgtggccgggtggcgtctatagaaacgcaaaaaaaagccccgcgaatcgcggggctttccagcgaggcctgggcccggctcagatattggcgtcgaggaaggccgccagctgcgacttggacagtgcgccgaccttggtcgcctcgacattgccgtccttgaacagcatcagggtagggatgccacgcacgccgtatttcggcggggtatcctggttctcgtcgatgttcagcttgcagaccttcagcttgccctgatagtccctggcgacttcgtccagcaccggcgcgatcatcttgcacggaccgcaccactcggcccagtagtccaccagcacagggccgtcggccttcagcacgtcctgctcgaagctggcatcagtaacgttgacgatatgttcgctcatgaaatctctccgtagtcggacgcgaattgaaacgcgaaagtgccgaccatcatatcccgccttgaccctcgccggaaggcgcagccgattgagagtctctatcgttggtcggctgattcccgattgatcggctgccgcattggcgaccctcgccctatcgtggcaggatggcgcagttttccaatggacttgcaaagcatgccgcaaaaacctgccgaggcattcccgctgattgccgccctggacctgggctccaacagtttccacctctgtctggccaaggccaatatccacggcgaagtccgcatcctcgaacggctgggcgagaaggtccaactggccgccggcctcgacgaggagcgcaatctcagcgaagaggccacccagcgcggcctcgactgcctgcgccgcttcgcccagttcatcagcggcatgccccagggttccgtacgcgtggtcgcgaccaacgccttgcgcgaggcgcgcaaccgcagcgatttcatccgtcgtgcggaagaggttctcggccatcccgtggaagtcatctccggccgcgaggaagcccgcctgatctacctcggcgtcgccaacagcatgcccgacagcggcggtcgccggctggtcagcgacatcggcggcggcagcaccgagttcatcatcggccagggtttcgagtccgagctgcgggaaagcctgcagatgggttgcgtcagctacacccaacgctacttccgcgacggcaagatcaccccggcccgctacgcccaggcgtacactgctgcacgcctggaactgatgggcatcgagaacagcctgcggcgcctcggctggcaacaggcggtcggcgcctccggcaccatccgcgcagtggcgctggcgatcaaggccggcggccacggcaacggcgagatcagcccggacggactggcctggctgaagcgcaaggtgctcaagctcggcgacgtggagaagctcgatctggaagggatcaagccggaccgccggaccatcttcccggccggactggccattctcgaagcgatcttcgacgcgctggaactggaacagatggttcactccgagggcgccctgcgcgaaggcgttctctacgacctggtcggccgtcaccagcacgaggacgtgcgcgaacgcaccatcagttcgctgatgcagcgctaccacgtcgatccggagcaggcttcgcgggtggaggccaaggccctcaaggtgcttgccgaagtcggcgacgcctgggagctgaacgacgaactgcaccgcgacctgctgagctggggcgcacgggtccacgagatcggcctggacatcgcccattaccactaccacaagcacggcgcctacctgatcgagcactccgacctggctggcttctcgcgccaggaccagcagatgctgtcgctactggtacgcggccaccgccgcaacattccggcggataagctggcggagttcgccgcggaaggcgacaagttggtgcgcctgtgcatcgtgctgcgcttcgcgatcctcttccaccacattcgcggcacccaggaaatgccctcggtgcgcctgaaggcagagcccaagagcctttcggtgaccttccccgagggctggctggaagccaacccgctgacccaggccgacttcgcccaggaagccgaatggctcaagcgggtcggctacagcctcaacgtgcggtaagcaccggcgcggccagcttctccagcagggtcgcctgggtattgcgggggttctggttaccggtggggctgagccgctggtagctaccgtcggcctgcaacacccaggcctgggtgttgtcggtcagatacgtttccagttccttcttgacccgctgcaccagcttcttgccttccaccgggaagcaggtctcgacgcgcatgtcgaggttgcgctccatccagtcggcgctggagagatagagcttctcgtcgccgccgttgaggaagtagtagatgcggctgtgctcgaggaagcgtccgatgatcgagcgcacgtggatattgtgcgagacccccgggatgcctggccgcaggcagcacatgccacgcaccaccaggtcgatcctgaccccggcctggctggccttgtacagggcgcggatgaccttcggatcggtcagcgagttgaccttggccatgatgtgcgcaggctggccgagcgccgcctgggccgcctcgcggttgatcatttccagcaggttcttcttcagggtgaacggcgcatgtaacagcttcttcatgcgcagcgtcttgcccatcccgatcagttggttgaacagcttgtgcaggtcctcgcagagcgccacgtcggcggtcagcaggctgtagtcggtgtacaggcgagcgttgccggcatggtagttgccggtgcccaggtgcgcgtagcggcgcagttcgccgtcctcgcgacggaggatcagcatcatcttggcgtgggtcttgaagccgaccacgccgtagatcactaccgcaccggcctgttgcaggcggctggccagttgcaggttggactcttcgtcgaagcgggcgcgcagctcgatcaccgcggtgacctccttgccgttgcgtgccgcctcgaccagggcgtcgacgatctcagagttggcgccgctgcggtacagggtttgcttgatcgccagcacgttcggatccttggcggcctggcgcagcaggtcgatcaccggagtgaaggactcgaacgggtgcatcagcaacacgtcgagcttgctgaggacgttgaagaggttttccttcttctgcaaaagacgcgggatcgccggggtgaagggcgggtactgcagctccggatggctttccaggccggtgacgctgaacaggcgggtcaggttgaccgggccgctgaccttgtacaactcgctttcggacaggccgaactgcttgagcaggtagttggtcaggttctgcgggcaggtatccaccacctccaggcgtaccgcatccccgtagcgacgcgagaacagctcgccgcgtagcgcgcgggccaggtcctcgacatcctcggtgtccaccgacaggtcggcgttgcgggtcaggcggaactggtagcagcccttcaccttcatgccggggaacaggtcgtcggcgtgggcgtggatcatcgacgacaggaacacgtagttgtcgccctcgccgccaacgtcttccggcagcctgatgatccgtggcagcaggcgcggcgccgggatgatcgccaggccggagtcgcggccgaaggcatccatcccctccagctcgacgatgaagttgaggctcttgttcaccagcagcgggaacgggtgggtcgggtcgaggccgatcggggtgatgatcggcgcgatctcgtcgcggaagaagcgccgcacccaggtcttgatcttcagcgtccagtgacgccggcggatgaagcggatctggtgcttggccagctccggcaacagggtctcgttgaggatccggtactgccgcgatacctgctcgtggaccagctcgctgatccgcgccagggcctggtgcggcagcaggccgtcggcgccggcctgctcgcgggcgaaggtgatctgcttcttcaggccggcgatgcggatctcgaagaactcgtcgaggttgctcgagaagatgaggaggaacttcagccgctccaggagcgggtaggactcgtccagcgcctgttccagcacgcggatgttgaactgcaactgggagagctcgcgatgaatgtacaggctgctgtcatccacgctgggaaccaccgcaggtggcgtttccaccgggatcgtttcggccatcttcacttctgcttcgctttccacgttcgccactacggtttcgtcggcggcgatacgttcgatctcatcaagtccttgctgcgtattcattcatcttcccgagggggtcaacgcccccgtcttaattgttctgcggcctgcttggcgaagtaggtcagaatgccatcggcgccggcacgtttgaaggcggtaagggactcgaggatcaccgattcggccagccagccgttctggatggcgcccatgtgcatcgcatactcgccgctgacctggtagacaaaggtcggggcgcggaattcatccttcacccgacgcacgatgtcgaggtagggcatgcccggcttgaccatcaccatgtcggcgccttcggccaggtcggcgaccacttcgtgaagtgcctcgtcgctgttcgccggatccatctggtaggtggccttgttgcccttgccgaggttcgaagccgagccgaccgcatcgcggaacggaccgtagtaggcgctggcgtacttggccgagtaggccatgatccgcacattggtgtggccggcagactccagggcctcgcggatcgcaccgatgcgaccgtccatcatgtccgagggcgctaccacctgggcgcctgcctcggcgtgggacagcgcctgccgtaccagcacgtcgatgctgacgtcgttgaggacgtagccatcgtcatccaggatgccgtcctggccatgggtggtgaacgggtcgagcgccacgtcggtgatgatgcccagctccggaaagcgctcgcgcagggcgcgggtggcacgctgggcgatgccttccgggttgtatgcctcggcggcgtccagggacttcttctccaccggggtcaccgggaacagcgccagcgccggaatgcccagggccacccactcttccgcctcgatcagcaactggtcgatggacaggcgctcgacgccgggcatcgacggaatgctttcacgctggttgaccccatcgaggacgaacaccggcaggatcaggtcgtcgacggtgaggacattctcgcggaccaggcggcgggagaagtcatcgcggcgattgcgccgcaggcgggtgtagggataggcgcggttggcgggagtgaagctcacggttttactccagggcccagataacgggcacagtgtgacagttatagtccctgattatgacggattggcaacaagcgacgacagtgactcaaggtcgcggcatcctgccgcaccgccaatcatcgcaaaaagccagcggcaaaggccattcattgcacaatcaatgacctgagccgtgacgatcgcgctttccccacgccctcaaccgagttaggctgcgcgttcatttcgcttcgctgccccgatgatgctccaacaattcctgcaggacttcggctatttcgccctttttctcggtactttcttcgagggcgaaaccattctcgtgctggccgggttccttgccttccgcggctacatgcagctggataccgtgattctcaccgccttcctcggcagctacgccggtgaccaactctggtacttcctcggacgccgccacggacgccggttgctggcgcgcaagccgcgctggcagaagctcggcgacaaggcgctggaccatgtgcgccgccatcccgacctgtgggtgctgagtttccgcttcgtctacggcctgcgtacggtgatgccggtggccatcggcctgtccggctatccaccggcccgctatcttcttctcaacggcatcggcgccatcgtctgggccgccgcgctgggctccgccgcctactatttcggcagcgtactggaaggcatgctcggcaacatcaagaaatacgaactcatggtcctcggcggcctgatcgtgctgggcctgctgctctggctatggcggcgtttcaagacaccgcgcggcaacggcgcgggcggcaacgccgacaaatccgagtgaacccgcgccggcgcgactgaacagccggccccttcgcacactccaactccttgtaccctccgctccggctggccgccggggccggcggctcgctatgcttgcgcgataccgaccccggccaggcccgtccggtccggatcctgcgttcccaaggagtaagcctcatgcacaagaaagttgccgtcatcctctccggttgtggcgtctacgatggcgcggaaatccacgaaagcgtgatcaccctgctccgcctcagccagcgtggcgccgaggcacaatgcttcgcgccgaacatcgcccagcaccatgtggtcaaccacctgaccggcgaggaaatgccggaaagccgcaatgtcctggtcgagtccgcgcgtatcgcccgcggtgaagtcaaggacctgcgcgaagcccgcgccgaggactacgacgcgctgatcgtgcccggtggcttcggcgctgcgaagaacctcagcgactttgccatcaacggcgcgcaatgccaggtgcagccggacgtgctggcgctggccaaggctttcgccgaagccggcaagccagtcgggctgatctgcatcgctccggcgatggcggcgaagatctacggcgccggcgtccaatgcaccatcggcaacgacgccgacaccgccgacgcgctgaagcagatgggtgccgagcacatcgacgcaccggtggacgagatcgtcgaagacagcgcgcgcaagctggtgaccaccccggcctacatgctcgcccagtcgatagccgaagccgcttccgggatcaacaagctggtcgaccgggtgctcgaactggtggaccaggacaaggcctgatcggccaagcacgagggcggtcgcgccgccgcccttttcaaatccgtgccgctacgccagcgtgcgtctcgaaaccatcgaatcgagacgccgcgatgcgcgaaacgccttcctccgccctgcctgacgacgtccaccaactggtggcggatttcttccagcgcatccccttcaaccgcatgctcggcatccgcgtggtgagcctcggccgcgagcgggtagtcctcgacctgccgatgaaggacgaactgatcggcaacttcgtccagggcattctccacggcggggtgatctccagcctgctcgacgtcaccggcggtgcgatggccctgatcggcgccctcgaacggcatcgcgaactgccaggccacgagcgcatggcgcggctgtcgaaactcggcaccatcgacttgcgcgtcgactacctgcgcccggtacgcggccggacgttcaccgcccatgcggtgccgcttcgctcgggcaacaaggtcgcagtggtgcgctcggaactgcatagcgacgacggcacgctggtcgccgtcggtaccggtacctatctgtgcggctgactcgcgcgtagatcggcttcccgctgcaggcgggtgagcaggcggtccagggcgttggcgaacgcctggcggtcacgctcaccgtagggcgcctggccgccgcccatctgcccctggtcacgcaggtcggccatcaggttgcgcatggccagcttatcgcccatgttccgcgcgtcgaactcgcggccgcgaggatcgagggcggcaacctgtttcttgatcagccgatcggccagcggtacgtcgctgcagatcgccaggtcgcccggctcggcctgctccaccaggtaatcgtcagccgcatccatcccgctttccaccaccaccagacgcacgcaggcgaacggcggcttgacctgcggctggccggcgaccatccagacttccagcttgcgcttgagagcgaacttgcagaccagttccttggccgccttggggcaggcgtcggcatcgatccagatacgcatgaacggacttccgtagaaatgacgacggccagtatcgcactggccgtcgtggttgcgcgaacccgctcagtcggcggcgttggccgccgcacgccggcgctcgacgatccggctacgtccgtagagcagcgcgatggccaccagcgccatggcctgggccgacagcgaataggcgtcggccttgatccccagccagtcgaagtcgaagaacggcaccggacgggtgccgatcaccccggcttcctgcaaggcgatgacgccatgtccggcgaacaccaccgagagcgcacagagcaacgccgcgttgatgctgaagaacaaccccagcggcagtttcgccgaaccacgcaggatcacccaggccaggccgatcagcaggaccacggcggtcgccgcgccgccgatcacggcattgtgcccggccggtccggcctgcaaccagagggtttcgtagaacaggatgacctcgaacaactcgcggtaaaccgagaagaacgccagcactgcgaagccgaagcgtccgccaccgcccaccaggctgctgcggatgtagtcctgccaggctgccgcgtggcggcggtcgtgcatccagacgccgagccagagcaccatcacgcaggcgaacagagaggtgaagccctccatcagctcgcgctgggcaccgccgatatcgatcacataggcggccaacgcccaggtggcgaagccggcgacgaaggccagcccccagccgacgtgcacgccacgcacggcactttcctgcccggtattgcgcaggaaggcgaggatggcggcaagcaccaggattgcctctaccccttcgcgcaacaggatcaacaaggcggaaacgaaactgatggagaaactcagcgagtcgccgccaagctgcttggcggcctctgccaacttgcccttggccagctccagctgttgcgccacctgggcttccgggaggccatcgcgcaacgcctggcggtaggccatcagctgtttctcggtggagcggcgcaaatcggcgtcgacgttgtccagcgagctttccaccagctcgaagccttccaggtaggccgccaccgacaggtcgtaggcctggtcgcggtcgccttcgcgatagaccgcgaagctcttgtccagggtggcggcggtatagtcgatcaactgcccaggaccgcgctgctccagcggcggatgcgcacgcagggcgcggaagctctccgcagcggcctcgccgtcgtactcggcgacttcggccggagtctgcgtggccagggtcgccagcgggtaggcatgggccttgtccggctgcgcactgcgggcgctcaggccggccacatagctggccagatcccagcgctggcgttcgtcgagctggtcggcgaacgccggcatgtcggtgcccgccacgcccaggccgatgacgttacgcaggtcgtagaggctcaggtggtcgaggcgctggcgatcggtgaggttcgctggcggcggttccaggccgatgccggcggggccgtcgcccttgcccgcatcgccatggcagatcgcgcactgctgggcatagatcggcgccgcgcggctcgggtcgggggtgatcgcgggggtctgcaccacctggtagatatccgccacccgtgcctcgaggttgcgcgcctggagggccacgtcccttcccggcaagcgctgctcgatggcctggcgcaggctggcgacgcccctctccagctcggcgcgctcggggcgcatcggcagggtcaggaccaatgcctgcaggttgccgacgaactccacctgttcctggtattcgctggggtcgacgatcttgccgtcagccacggtcggcggatagtcggccgccaggtaactcaacagatgcaaggcttgggaggggtcgacggccgtgtcggctagagctccaaggctgaacgcgcagaccagcggcagcagccacagcaggattttcggagggtgcatagcgaagacgaagtgagaatggaagagattaaattgtcccttcgccttcccgcccatgcaagaaatactctgtaacaatcacgcccatcagcgtgtcgggcggctcagagcggcgctcggcgtaccgtcgccagcagccccgcggcaccgacgaacaggctggcgaaggtacggttcaccagcttctgctggcgcggcgaacgcagtacgcgtagcacgcgcgcagccagcccggtgtagccggccatgacgatcaggtcgacgacgatcatggtgccgcccatgatcaggtattgcgccagcagcggctggtgcgggtcaatgaactgcggcagcaccgcgagcatgaagatcaccgccttgggattgctggcgttgacaaggaaaccacgcagcaccagggtcaacggtcgccccagaggccgttcgccatcggtgctcaaggcctgtggcggcgcctgccactggcgcaccgccaggtacaccaggtaggccacgccgaaccacttgatcaggctgaaagccagtgccgaggtcgccagcaacgcaccgacgccggcggcgacaatggcgatctgcagggccaggccgatctgcaggcccagcgcgttccagtagcctcgcgcaaagccgtactgcaacccgcaggacatcgaggcgatggctccggcgcccggcgacaggctgatggcccagcaggcgaggaagaaggcgaaccaggtactgacgagcattgcacacctcggaaagcgaacgcggctggcggcgggaacgaaaaagccagtgtgcaccaaggcggagcagccgcacaggttttccgaccacgcgcctcgcccaacctttgcgggcgcaacctggcggacagaaaaaacccggcagatgccgggctttcccgaggatacgcgctcagccatgttgggcagaccaccgcgatgcggctattcgccctggccccgaacgctctcagtccggcgaacccttgcgcagcttcaccggctcttcgccgcgcttgcgcgccagggctccgcgcaagcggatgttcagcgcctccaccgccagggagaaggccatggcgaagtagacgtagcctttcggcacgtgcacttcgaaggactcggccaccagcacggtgccgaccacgatgaggaacgacagggcgagcatcttcagcgaggggtgtttctcgatgaagtcgctgatggtgcctgccgccagcatcatcacgccgaccgagatgacgatcgccgcgaccatcaccggcacgttctgcaccagaccgacggcggtgatcaccgagtccagggagaagatgatgtcgatgatcgcgatctggacgatgatgcccatgaagccgtggaccttgccgccgctcttctgctcttcttccgcgccttccaggctgtggtagatctccatggtgctcttgaacagcaggaacaggccgccgaagaagaggatcaggtcacgcccggagatgccctggccgaacaggtggaacaggtcggtggtcaggcgcatgacccaggtgatcgagagcaacagcaggatccgcgtgcccatggccagggccaggccgaagaagcgcgccttcggttgctgggccggcggcaggcgcccgaccaggatcgagatgaagatgatgttgtcgatgccgaggacgatttccagggcggtcagggtcaggaacgcgacccagatttcaggactggcgagccattccatagatggttatttcccgttttttgttggagttgaaaaacctggcccacgccagcgacgcacggctttctggaagaacaggctgttgggaatctgcagcagcgggcccggcgagccatcctcgagggtttcttccagtgtcgtatacaagagattgatggcaaccacgcgtccggtgacgcccggtttgtcggcgctatcgatcagctccacgcggtcgccgatgcggaacggcccgacggtgaagatcagcaacgcacagaacaggttggagagcacgctccagatggcgaagaaggctaccgccgccaccgcggcgaaaccggtcagcgcggtccacagcacttcggcggacacgcccaggcgctccagcaccatgatcagtgcgctgaccatgatcagccagcgcaggcccccacgcagcggcaggagcagctccggcggcaccggataacgctcgccgatacgggtcaccgtgcgtcggaccaggcgctgtagcagccaggcgaccagcaggatgagcaggatctgcatcgccaccaccagcggcccgctccaggtctgcgtcaacacctgcaagtcttccatcactcactggcctctagttctttctgcagggcttcgagggtttccagggcctccagccaacgttcctccagctcgccttcgcgaaccttcaggctcgattgttcggacagcaactcgcgcaattcgtcctttcgcgatacgtcgtacagggcgctgtcgcccagccgcgcctcgatagcggctagcttttcgtgcaggccgccgagttcgcgctccagcttgtcggcctcgcgcttgtgcggcgccagctgctggcgcagcgcggccgctgcctggcgctgggcgcgcttgtcggtgcgttcggtcggcgcacccggcgcggtctcggcctgcggcgccttgcgcgcgcgatagtcgaccagccaacgggcgtaatcgtcgagatcgccatcgaacggcaccacgcgcccatcggcgaccaggaggaattcatcggtggtgcttttgagcaggtgccggtcgtgggaaaccaccaggaccgccccggaaaactcctgtagagccatggtcaaggccaggcgcatttccaggtcgaggtggttggtcggctcgtcgagcagcagcaggttgggcttctgccaggcgatcagcgccagggccaggcgcgctttctcgccaccggagaagttcaataccggctcgtccacccgaacgccgcggaagtcgaagccgccgaggaagtccttgagggtctgttcgcgctcgccgggggcgatacgctgcagatgtagcaacgggctggcctgtggatccagcgaatcgagctggtgctgggcgaagtacccgatggccaggttctcgccgcgcagcaggcggccgcccagctcgggcaggtccccggccagggtcttgatcagcgtcgacttgccggcgccgttgggaccgagcaggccgatccgcgcaccgggcaccagttgcagcttgaccttctccagcaccgccttgtcgccatagccgagacggccttcgccgagatccagcaacggccgggagatcttgtccgactcgcggaaactgaaattgaacggcgaatcgacatgtgccggcgccagttcctctagacgctccagcgccttgatccggctctgcgcctggcgcgccttggtggccttggccttgaagcgggcgatgaagctttccatgtgcgcacgctgcgcctgctgtttctcgtaggcctgctgttgctgagccagccgctcggcgcgggtccgctcgaaagcggaatagccgccgcgatagagggtcagcttgcggttttccagatgcaccacatggtccaccaccgcatcgaggaagtcgcggtcgtgggagatcagcaccagagtgccgggataacccttgagccactcttccagccagaggatggcgtccaggtcgaggtggttggtcggctcgtcgagcaacagcaggtcggacgggcacatcagcgcctgcgccaggttcaggcgcatcctccaaccgccggagaaatcaccgacccggcgctccatctgctcgctgctgaagccgagtccggccagcagcttgcgcgcccgtgcatcggcggtgtaaccgtcggcgttgtccagttcggtatgcaggcgcgccagggcagaaccgtcgtgcgccgcttcggcggcggccagtgccgcctggatctcgcgcaggcgactgtcgccgtcgagcacgtaatccaccgccaggcgatccagggtatcgacctcctggcgcatgtgcgcgatgcgccagtcggcgggcaacaggcagtcgccggcatcctggccgagctggccgcgcaacagcgcgaacaagctggacttgccagcgccattggccccgatgagaccggctttctggccggcgtgcagggtcagttcagcagcttccaggaggcgctgcggcccgcgctgtagcgtaagattgaggagtcggatcatggcggcggagtttatcagtttcgcccttgcggagcgtgaggctgtatgactggaaatgtctggaaattcgcggtggacgtctatgcccggccgggcgtggaaacggcttgcctcgcgcttcaggagcaaggtgcggacgtctgcctgttgctggtcgccgcctggcttggcaggcgcggtgtgagctgctcgaaagaacgcgcccagatcctggagaacgccgcgcgtccctggcgcgaaacggtcatcgaacccctgcgcagattgcgttgcgcctggcgcgaagcggcaacccacgacgcctgcctggccgaactccgcgaggaaatgaaggcccaggaactacgagcggaacgggaacacctgcaacgcctggccgacctggccacagcctggctggagggccaggaagcgaatcgcagtgcggatgcctggctgcaagcctgcagccgggacatctgcacggaagcagagcgccgggctttgctggtgcttggctcggcggctttgcagacagcgccttaggaggcgctggtcggggcggcgccgttgctgcccgcggcaggcgttgccgaagcagcgctggaggcggctgccggggcgctgggagtcgccgcaggcttcgcagcaggagcggtggcgggcttggctgcggcaggtttcgcggctacgggtttcgccgcaggcttggccgccggtttcgccgcaggcttcgcagccggcttggctgcaggcttcgcggccgcgggtttcgccacatgcttggccgccggcttggctgcgggcttcgcggctgcggttttcgccgcgggcttggccgccggtttcgccacaggcttcgccgccggcttggctgcgggcttcgcggctgcggttttcgccgcaggcttggccgccggtttcgcaacaggcttcgccgccggcttggctgcgggcttcgcggctgcggttttcgccgcgggcttcgccgccggtttcgcagcaggcttcgccgccggcttggctgcgggcttcgctgccgcggttttcgccgcaggcttggccgccggtttcgcagccggcttggccgcaggcttcgccgctacggttttcaccgcaggcttggctgccgccttcgcagcaggtttggtcgcgggtttcgccttgcggctctccagagccttgccagcagcttccttcaccttgccgacaccctgcgccagcttgaggctttcctgtacgtcacgcttgaggccgacgatgtaggtacgggtgtccgcctgccgggccttcagggtatccaacgcttcttccaggtcgctgatggtctcgcgcgccttggcctgagccttggtcttgccggccttggcagcatcctgcagcttggtgcgagccttgtgcagtttttcctgggctttgccacgttgcttttcaagtttggccaggagcttttccgaatcgaccagcgcttgtttgcacgcaccttccaggtgctcgacaaggctgtgggaaagttgctgcaacaggtgcaagggggtggtgacgggcttcttgttggccgacatgacgtgcctccaggcggacgtggttgcgcccatactagacccgcaaaccccctctcgccaacgggttcgatgtgctacaagcgacgtgcgccaggattgcccgccgattcgtctggagaaaccgcatgccgcgccgccttttcatcggtctttttctactgccgctgccgcttttcgccgcgccccccaaggacgaactggcctatgccgtaggcgcccgcctgggcacgcgcctacagcaggaaatgcccgacctagagctatccgaactacttctcggactgcgccaggcctatcgcggcgaggcacttgaaatcccccccgaacgcatcgaacaacttctgctgcaacacgagaacgccacgacggaaacaccgcggatcacacccgccgaggcccgcttcctggccaacgaaaaagcccgcttcggcgtccgcgaattgaccggcggcgtcctcgtcagcgaattacgtcgtggccaaggtaacggcatcggcgcggcaacccaggtacacgtccgttaccgcggcctgcttgccgacggtcaagtgttcgaccagagcgaaagcgccgagtggttcgccctggacagtgtgatagagggatggcgcacagcgttgcgagcgatgcctgtcggcgcgcgctggcgagtggtgattccttcggcgcaagcctatggccacgaaggcgctggcgacctgatcccgcccgacgctccgctggtcttcgagatcgacctgctgggcttccgctgaaatgcaaaaacggcgctctcccgcatggagacgcgccgtttcgtaacgactcgccggtgaatcagaccggtactgccgaaccctctgcgccgctctggctgtgggcgttgtgcaggacttcgatgaggcagtcctccagctcgaagcgttcgtgcaactgttgccgcaggaccttcagctccgcgatgaggcaggctccttcacggcaatcgccgttgtcgcagcggtcgttgaagttcagcgcggattcggtgatggcttccagccgggggaagatctgcttggccagctccaggccgcgctgatcgccgaaggccttgccttccgccgtcagttgctcgtagacctcgaagtgtccggcagatacgtagtccagcagcaattggcagaaatgctggagttcttcggcgttgggcgccggtgcctgaataccgctcagggcatcgaaggcctgcaccagttgctggcgctcatgcagccagcgatcgatcagttggtgcacacccccccaccgctcttgggcattacggcagctttcgagcatgttgtcctcgcttccctcttcggacgtcccggagaatcatcgtccgctccgagacgcattgctgacgcactctctgcgctctgtgggagaacgcctgtgcaaggggcggactccggcgctatggaaagccagattatgcccccgggatgaccccatcaagacgcccgtacagaaaaattcatacggatgtttgatcggtatcccgcatccgctctggttttcgccaaatcgatacggccgacactcgagagctgacgaaagaccacgcgacagcccgcatcaggtacgtcggaggaactgcacgatggagaagccgagataggcaacgaacgccagcaggctccattccggaatgctcagggtgaatagcgtccagctcacctgggcacaatccgcggtgccatgcaggaccaggcggatcacttcctggaagggaagcgcctgcatcatgtagtcgaggctgggcaggcaggccggcagttggtccagcggaacggtctgcaaccatacctggcgggcggccgtggccccgccgccgagagcgagcaggaacaccagcacggagtagatacgccgcccacgcaggccgggcccctggatcgcgccagcaaggcaggtcaggccgatcaggatgaagaagatccgctgcacgacgcacagcgggcaggcctccaggccaaccacatgttccaggtacagcgccccgcccatgatggcgacgcaggccaggaacgcgagaaggaaaagctgacgggggctggccaggggcatggcggatccacaggtacacaggggaaaggccgcctacggtagtggaaagcctccggccgtttcaagccgcaaggcagctctgcggcaaggcatcccgaatcatgccgggcgcccgcgacaagccgccacagtcctgccgatggagccgaacggggaacgccgggtggcgttccccatgctcaaatgcccgccaccaccacgggcagccccggagtacgccgatcgagcaggaccaggccctcctggaacaactggttgctgcgctcgacctcgccgagctgcgccagcaggcgtcccagctcggcgcaggtctcggcactgcgctggaagctcaggctggcctccaggtattcccgggccttgccccagagcttgttgatcaggcacaggcgccccagggtcagcagcaggccgggatcgttcggatgttccttgagccaaccttccgcggcctgcaattgcttgcccggatcgcgcccgcgcacctgcccgtagagttgcaccagggtcgcgtcgaagccttgcttgagcgcatggcggaggacttcttcagcctcttcctcggcgcccaggcgaagcagttgggcggcatagcccgcgacgatcgccgggtctgcacgcagcgccgaaggcacgttctgccagcgctgggtcagcggctgcaacgccgtctcgccctcgttcagtccacgctcgccggcttcctgcaaggaagccacccaggcacggcgttcgaggtcgcgcagttcggaatccttcagcacacgctccttgcgcagctccggcagcaggacgcaaagggcctgccagtcgtgctgggtgacgtacagctgctgcatcagccgcaataccgtgcggtgctgcggctggagcccgtgcagctcttcgagggtattgcgtgcctgcgggtagtcgccgcgattgatcagcagttgcgcacgggtcaggccgaccagcaattgggcatccggctcgcgctcgcgagcccggttcagcaggtcgtcggcctcgtcgtagcgctcgagttcgttggcggcccgcgccgcgccgaggtaatgcatcagcggccgctcgcccatctccgcagcccgccgcaaatgacgcagtgcctgcggccagttgccttcgccgagatcgcgcaggccgctgtgctcggccatctgcacgcgacgccggcggttgtagcgcgaccaggggttgaccacccgccccgagctgccgagcaggcgcaggaccaggcgcaccagcaccaccagcagccagaccaccgccagcagggcgaggaacgaccacaggctggattcgtaacggaagctcttgtaggcgatcagcacatagccggcctgctcggagatcgccagcccaaccagcgtggcgaccagcaccaccgccaggaccaggaggtagatgcgtctcatggacggccctccgtggccggagccgcctgcgcctcgggcaccaggttgccggcggcctcgcggcgcgacacgtaggactgcaaggcgctcagggccggtgcgaggtcagggacctgcacggtgaccggctgcttcgccaactcatcgatacgcaacttcaacgcgcggctgtcggccagctctacgttgaaatagccgtccagcacgtcctgggcctgcttcagcgcctgctcgtagacttcctgcttgccattcagcgccgcccactgggcttgctccagggccaggccgatggtcaggcgcacctgcgccaattgctcgccggccagcagcggacgaatgtcctggccggcattgaagtcgatgcggatgtagcgcgagatcttctcccaccacagctcccaggtgctgttgccgtcgccccaggcgacattgctggcaccgctttcgccttccttgaaggtcggcgtgagcggttgcaactggttgacctgctcgcgcaacgccgccagttgcacgaacagcccggtacggtccggctccggcaacgcacgcagggcctcgaggctggccgccaacttggcgcgggcggcataggcgccgggatcgttctgcgcgcgcaggatgtcatcggcgccctgcaccagctcggtggcgctacccacgtcctgcaaggcggacaggcgcaggctggccaggcgcagcaggtgttcggcctcggccagtcgccattgctggcggctctggccgaggaccttcttcagttgctcgctgagatgctgctggtcgccctgcagctccaccacaaggcgtcgccgggcctccagttcgtccgcggtaggcaaagcgtccaggcgggcagccagttgctggttacgctgggccagggattcggtcttgccacgggcatcttccagctgcgccagttggtcgcgctcggtgccctgcaactgctggacctgccagaagctccagccacccgcgccgagtcccgccacgccaaccagcagggcgagcaacgccaggccggtggcggtaccggaacgcctggatgcatcgggtgcaacgggagaaggggtggaagtggaagttcttgcgtcgtcttggggagtgactgcttcgctcacaggtccatcctttggtcaagaaagttctaggcggcgctcgtcagggccgccagcaaggccggcgcgctcgcgccccggcaatcaatcacccgttgcgcacccagttcgcgcgccatctcggcgacccgcgggctgggtacgaacagcggcaaccggcctatctcgggccaatcggctgccgccaactgatacagattttgcaaaccctgtccactgctgaccaccaggccgttcaggcgttccgcccgcacccttgccagcagctctccggccggatagtccggagcccggcgccggtagagtggcaggtagtccacctgcacgccttggccgcgcaggcgctcggcgaggaattctcggccaccttcgccgcgcatgatcagcactttcggatcgtgcacgcgcagggaatcctggaacgccggcagcgccagcaacgcttcgctgtcgtcgccctgttcagggtaggttacgtcgaggccgtaggcctcgaggatcgccgcggtcgccgcgccgacgctgcaccaggtctgctgcggcggctgcggccagtagcggtcgagccgctccagccccaggcgcgccgccggcttgctgaccaccaccaccgcgcagtagcggtccaggtcgagcatcagcgtacgctgctccggggtttcttccagcggatcgatcgccaacagcggcaggctgctgctatggacgcccgcctcgccgaggctggcggccagggccgcgcactcctcgtcggggcgcgtcagcaggagccgccagccgctcacggatgtccggcctcgccgtagacggcttcgagaatcgcttcggcgccctgctccagcaggtcctcggccacccgcacgcccagcgcctcggcgtccgccagtggcgcccgcccctcggcgcgcagcaactgggtgccatcaggctggccgaccaggccgcgcagccacagttggtcgccctcgcggatggcgtagcaggcgatcggcacctggcaaccgccgttgagccgcttgttcagcgcgcgctcggcagtgacccgcagagccgtgtcggtatggtgcaagggttccagcaaggcatgcaggtcgctgtcggccgtacggcattcgatgccgacggcgccttgtccgccggcgggcaggctgtcgtcgacactgatcgaggagcggatgcgcgactcgaagccgaggcggatcaggccggcggcggcgaggatgatcgcgtcgtattcgccggcatccagcttggccaggcgggtattgacgttgccccgcaggaaacggatctgcaggtccggccggcgcgccagcagctgcgcctggcggcgcaggctggaggtgccgaccacgctcccggctggcagttgctcgaggctggcgtaggtgttcgagacgaaagcgtcacgcgggtcttcgcgctcgcagatggtgtagaggccgagcccctcgggaaagtccatcggcacgtccttcatcgaatgcaccgcgatgtcggcggcgccttcgagcagggcggtttccagttccttgacgaacaggcccttgccgccgatcttcgccagcggtgcgtcgagcagcttgtcgccgcgactggtcatcggcagcagggtgacggtcaagccgggatgcgcctgttccaggcgcgccttgacgtattcggcctgccacaaggcgagggcgctctggcgagtggcgatgcggatttcgcgggacgacatgggatattccgtgcacagggatgcgcccatgataacagttcgaacccgagtgcgcggacgctgggcccgatagccgcacccgggtcgctggcgaaccgccgaccgccgtcagagctgatgcatcagacgcctgaccccggccacgtgccgccggctgacggtcagcgcatcgccgtcgaggcctttcaggtagagctggaaatgccccagcggcgtacgctgcaggcgttcgatccgttcgcgggcgaccagcgcgttgcggtggatgcgcacgaagcgctcgccgaactcgtcttccagcgccttcaacggctcgtccagcagcacctcgccctgcgcatggcgcaaggtcacgtacttgtggtcggcaatgaagaagatcacctcttccagcgggatcagctcgatccccttgcgggtccgtgcactgatgtggctgcgcggaccgctgccgccggaggccgggggcttggtcagcgcggccagttgcacgcggttcggtcgcgaggctttcttcaacgcctcggccaggtcttcgctgcgcaccggcttgaccaggtagcccacggcgctgacctggaaggcttccagggcgaattcgtcatgggccgtgcagaagatcacagccggcggcgcttcccgctcgcagagtctggccgcgacctggaggccgtccagaccgggcatgcggatatccagcaggacgatatcgggcttgaggctgtcgatcagcgtcagcgcttcttcgccattgctggccgagggctcgaggacgcgatagccgtccagttgccctaccaatcgggccaggcgctctcgcgccagaggttcgtcatcgacaatcaggacattcataagctcaggcttcctgcatgagtcgcgcacatggatagcgtagacaggtgtagtgccgtccgtcacggcgctcgacgctgagactcgctttaggcccgaaaagtgccccaagtcgtgcatcgatattgtgtaacgcctgtcgcgtgcctttcgacgggggcgactcgagcgcctcgtcgtaggggttgctcacacatagctggaacactccttcacgataaaccgcctcgacctgcaccaggccaccttcgacccgcggctggatgccatagataagcgcattttccagcagcggctgcaaggtcagttgggggatcggcaggttggccggcaccccgtgcacctgccagtccagttgcaggcgatcgccaagacgatactgctcaatggaaagatagcgccttgccagcgccagttcctcctcccaggaaactaaagtgccgggcttcgccaggctggcccggaacaggtcggacaggtccagcaccgcatgctcggccttcagcgggtccagctcgatcaggctggcgatgctgttcaggctgttgaacaggaagtgcgggcgaatccgcgcctgcagcgattccaggcgcgcctgcaactcggcctgctgctgccggcgccactggctctgcaggtaaaagtagcgcagcaccagggcggacatgatcagcgcgatcagcgcgtgccgcagatacagattgacctcgccggcacgcgtcagttctccgcccagctgatagtgctcggcgaccgccgtgcagcccagggtgagggccaccaccaacaggcagcaggcactccccgccagcgccaccggcaggcgtgcgagcaatggccgcaggcggcagaacagcgccgccgagagcagtacgatccactgcacgaacagcgacgccagggccaggcgcacccagttgaagctcggcgtcatcggctccgccagcaccagcacgagcaccagcagctccgccagcagcaccagggtgaacagggcttcggcttcgcagagctcgggaatgaagaagtcgtcttggacggccggccgggtcgagcggccgggcttgaatcggataggcatcgacagagtttccgcaaggcccgtggcgcccgcaagacagccgcgggcgtacgggcgaaataaagcaccgaaatgccatctgccgcaaaaaaccgcgaaacagcgctcgttccggcttcgtcgacgagccgccggtttttcctcccggcctgctatcatcgtcgcactttgcccgtcacgcaggccgcgcggcctgtccgtttcttgttgcagcgagagataccatgagcgtagagaagaccaaccagtcctggggcggccgcttcagcgagcccgtcgacgccttcgtcgcccgtttcaccgcctccgtcgacttcgacaagcgtctctaccgccacgacatcatgggttccatcgcccacgccacgatgctggccaaggtcggcgtgctgagcgacgccgagcgcgatgcgatcgtcgacggcctgcaacagatccaggcggaaatcgaagccggcagcttcgactggcgcgtcgacctggaagacgtgcacatgaacatcgaggcgcgcctgaccgaccgcatcggcgtcaccggcaagaagctccacaccggccgctcgcgcaacgaccaggtggccaccgacatccgcctctggctacgcgacgagatcgacaccatcctcgccgagatcacccgcctgcaggagggcctgctgggcctggccgaagcggaagccgacaccatcatgcccggtttcacccacctgcagaccgcccagccggtgaccttcggccaccacctgctggcctggttcgagatgctcggccgcgactacgagcgcctggtcgactgccgcaagcgggtcaaccgcatgccgctcggctcggcggccctggccggcaccacctacccgatccagcgcgagatcacctgccagttgctgggcttcgacgcggttggcggcaactccctggacggcgtctccgaccgcgacttcgccatcgaattctgcgccgccgccagcctggcgatgatgcacctgtcgcgcttctcggaagagctggtgctgtggaccagcgcgcagttccagttcatcgacctgcccgaccgcttctgcaccggctcctcgatcatgccgcagaagaagaaccccgacgtgccggagctggtacgcggcaagtccggccgggtgttcggcgccctcaccggcttgctgaccctgatgaagggccagccgctggcctacaacaaggacaaccaggaagacaaggaaccgctgttcgacgccgccgacaccctgcgcgatagcctgcgcgccttcgccgacatggtcccggcgatccggccccggcgcgagatcatgcgcgaggcggcacgccgcggtttctccaccgccaccgacctggcggactacctggtgcgcaagggcctgccgttccgcgactgccacgagatcgtcggccacgcagtgaagtacggcgtagacagcggcaaggacctcgccgagatgagcctcgacgaactgcgccgcttcagcgagcagatcgacgccgacgtcttcgacgtgctgaccctggaaggctcggtcaacgcccgcgaccatatcggcggcaccgcgccgaaccaggtccgtgccgccgtcgcccgcggcagaaaactgctggcacagcgctgaagtcgcgcccagtgcccggcagatctccctgtcctacccgagacttgatcgcacggcgggacaggaacgcccttgtagatcgacagccactctagtgaaagtccttcttcgctaaccggtcgcaatggcggaataactcagcatcagtgctcatcattgaaatcatcggccctgggcgtggcaaaaatgcccttggcttcctggcgccggtaataggcttcgatgcttagcccgggatcgatgcgcgccctgacgatgcagggctgctgttgccagggatactcatgcaggcgtcggtccagctccttgcgctccttggctggccagccctggtaggtgcgctggcgccagtaatggggatcgcgtccggtatgccgatcatgctcggcggtgaccggatctaaggggcggctcggctccaggaccggcaggtcgggcaacggctgggtcacgtccatgtagcgttgcaggcagtcccagaaggccagggcattgaccttgtcgagaccgagggagtggacgcgggtggccagacagaccttgttgtcggtatagcggtgatgcaaccagagcgcatagtcgtggctgccgtagccactgggcagcaattgcagcaccggatcgaactcgtcgaagggagcgacgaacaggcggcggaagcgacgcttgaagcggagcatgccgtccaggcgattgaattcactgccatcttgcttgaagactttgctgtagagccaaaggatggcgctgaagccgactgcacccataaaataagtagctacgcctatccaaattgctatttgcaaaccattggttccaaatattgttccatactggtacaaagccaatgggattgaaaataaaaaacccgacatctgaataacgtgaagatattttttattcgaaagaaaggccaccatggatattactgaaacagccaccacaaagaatgagcaaaccaaggtgtagagttgctgtatgtccctcctccactctccggtggcttctcccattatgccaattcccaaagcaatccatacaaaaaaatagcacagcatcctaagcgtgaatattatataaggaattctgctagagttctggaactgccaacgcatagagttgcaatatgcctcagcacctccaacctctgacttatcctcagccccgatcgaaagctgccctacaatctccatttccggatctagattggcatagttcccaaaggcaagatgggtgtcaaaaataccattacggttagactcctccttccaccttggcggcggtaaagagtcgttgacttcactgcgataagcactggctgagtacgtggcatccatgtgtacagtcatacgttgaactcactgttctctatcaaccaataaggtggcgcagcatgggggtccaagtcgtccgggggaaggtaccgattggcggatgtgaatgcactccaactcttcgggctgggttgaggcaggacaagccgctgctcaggctggtcggcattgagttcgaactgtgcgctgatcttcaaaccctgggtcatgcgcatgctatagcgggcccgaggagacaactgcggaatcggcaggctggccggcagcacgtagagcacgctggcagcatccaacggcaaggcttcgagcttggcggggcccgcggggacccgatggtagcgcttgacgccgaacagggtgcccggatcgatcggcaagctgctgagaaactcctgggccaccaggcggaacgccttctggccattctcgaacatggccaggagcggggaactcagcaccacggcccaatcgtttgcctccagcgcctgcaacttggggtcgatgcaggatagcgcagtgcggctgaccgcttggcgaccccgttccgcttcctgcaagacagatcgatgcgccgccggcgccaatttgcgccagtcttccaggcgatggacaaagacccgcggatggccgaggactcccagcaattggcgataggccgtttgcgggtctttcagatgggcgaagcgctggtcctggcccatcagcgaatcgagcaggccagcctcggcgaattgccggccgaaggggcctttcttgacgatggtttccgcatcgctgtcagtcagtagattagcgaccacagtgcctccgatcgccaaaaccgcaccagccagcaaagcataagggtttactatccatcctaggacgtaggcaccccacaggcccccacccactgcggccacaccgtaggccgcagccgcatcgctatctccctgcctcaaagctcggtagccatcccatacactgatgcctgcatcgaatagtgtggctgtgccaccaagcccacgtagcaaccctaacttagggctgcctgtttgaacttctagattcctggcccatcgaggggatatttgggctaccgatatacgtggggtttctagatactttgcagtagatggtccgaaaagcagctttgcatggcttcctccagcggctgttaaatcgattactgcaccgacagccccgatcgtccctctgtgcttttctccactgtctacaaagccactgtatgcctgcacctgcacattcaagttataaatcgcaaaccccagcatcatcgtcggcacgatgcgagtgttctccatcacctgggtcaacgtgcctaactgcgtacggaatttcgtgtaggcaagcaggtccgggtgatccttgggtaccgccaccaccatgacgttgcgcaggttggcgcgactcatgccggtgtcgcggggactggtgccggccaggggattgccggcaccgtcctgaacgatggcgcgccgatagctcttgcgcctcagctcctggcgctcgacctcggtcagaccgttgcgcaggccggctccgcgcacgccgacgacaaccatgtcgagcggcacctgactgtcgggcagcaggcggatacctttcatcttcaccgagagggcgctcagagtattgaaggtcggtgcgaacaagcggtcgagctggatctgggtggcaccctgggacagccggccgagttgctcgactacgctggcgccgaacacgtccagcaggtcgccgaggaagtaggcgaggctcttgccggcgctgggctggtcgacctcgcccagcagactggctcccagcatcagcgtgctgaggcccattgcgtcggggtccggcgtccgcgggctatcgcgcagcgcctgcaggcgccgaaccggctcgggaagttgtccttcgtccttggccaggagcatggcgccaagcgggtggcttgcctgcagaaccgtgctgaccacccgctcgacatgtgccgccagcgcccggtaggcggtaccgctgtacagtgcgtcgcagcggtcgggaagctggttcagcgcagccagtgcctcgctcatcaggctgtagggctccagcagggcttcgtcgcactggtgggtccagtcctgcaacaccgggtgcaaggggccttccagcagggcaaccagatgctcgacctgctgcgtcaggtggattcggcaagactgtcgctcctcggcgaagatcgcctcgtccagttcggcctgatcgacctcgcccctgagcttggcgagcgggccgtcgagcatgttgctcagcacctgtgcatagcgtccgttgggacggtgcggcagcagtgcattgaggctgcgcaagtaggcggcgcagtggcgcgcctgcgccgcagcgtggcgcaaggcgaacagcgagtcgtcgagcatcagcccgatgaggttgggatggccacgcagcttgagggtttccagtacgtcctctccggcttccagagtaggtagcgcagagggcggagcctgcttcagcaggggcgccaattcctgctggcgtcgctgcaactggcacaccagcgactcttcgcgaaaggcggcgaacgcaggtgtgaattccgccgggtcttccagcgcgctctcgacgttgaagtcgcgaggtcgcaaaccctgggcgtgatgatcaatgaccagcgcgggttgatggatggaggctttccagtgctggttggccaccgaggcgttccaagcggacgccatctgctggcagcgccggttgacccgctgcgggtcctcctccagccagtcgatgtacgaccaaggccagggagtttcgctataggccatggtgtagcgtgggatcacgaactgccccttgaccagcaccggcaccaggatcagcgcttgtgtcttgcctacggccggacgcttgtccgcacgctggctgcgcccctgcaggagatcgacttcgaacaggttgcccttgccatcacattccagttcgcgccacaacttgccgtcctggaacaggtagatccgtcccgcccgcggtagcgcgccggcgggcagctggtcgccataaccggccttgcccagcgttggcaggcggaccagcggcatcacagccaggaaggtgttctgctggatacgctcgtgctcctcatggccgagcatatcgctggccaccggaatctgcaggataccgccgtcctgtcgctcgacgttcaatgccagtcgtgcacgccgatcgttctggtaggcggtgcgcttgcgcacgccttcgtcgatactctggtcctggaatccgctcatgcctcgctctccggtggcaacagtacgacctggcttccttgcgccgggtctccccagacatcgacgatcaattgttccggccccttccgctcgggacggctacgcgccgggttgtccagtacctggcccgctgtcgccgcatccgcgtcgagcggcggccccggcaacagcggcgccgcgccgctgccgttgcccgggctgccgccggagttgacccggacgttggccccggagagggtcacgccgctggcgtcgagcttgaggaagctgccgccgcccttgagggtcagttcggcgccggcctccagcaccaccttcagaccgctgctcaggtggatctcctggccggcctcgacgaactggccgctggcgatcttcaggtgctggtcgttggctacggtgaggtggtcgctggctcggacctccaccttgcgctcgacgtgggtggtgcggtgttcctcggccttgaactcgctgtagctgttcgcctgcacggtgtcgtggcgttggtgaccgacgcggatcttctggtcgtgctcgatgttttcgtcccagtcgcgctgggcatggacgaagatctgctcctggcccttgcggtcctcgatgcgcagctcgttgtagccaccgccgccagggctgctgaggctcttgaagacgctgcgggtcttgtgccccggcagttcgtagggcaccggatgttccctgtgaaacaggcagccggtgaccagcggctggtcgggatcgccttcgaggaaggtcaccagcacctccatgccgacccgcgggatggcgatggcaccgtagttccttcccgcccagccggaggcaacgcgtaaccagcaactgctgctgtcgtcggcctggcccccgcgatcccagtggaattgcaccttcacccgaccgtagcgatcgcagtggatttcctcgcccttcgggccggtcaccaccgcgctctgcgtgccgaggatgcgcggcttcggcggcgtcggtgggggacggaagaacgcctcccagggcgtggcctggaagcggttgcggtaaccctgccggaagtcgtccgggctcgccgaggcatcggagacgatgctttcctccagcacctgaggctgccgcccctcgtgaatcacctcggtgagcagccagaggtcgttccagcccgcctggggatgggcggccagcggcaggaagtggccgctgagcagcaacggttggtcgctgcggccctcggccaggcggtagtcgctgcgctgccgttcgagggcgcgcctggccaggtgctttccgcgctcgcggtcgacgaagcgaccgggatagtcgtagtcctcgaggtccggccgggcttcgccgcgggcggcgctttccagcgtcaggcgcggtttctcgaagtcgtagtcgcggcgggtgacgcggctggtgcgggtttccaggcgtacgccgaagcgcttgaccgccggccggtcggcgaccaggccggagtcctgctggtaggccaccggcgcgagccgcgggaacaccgtctggtcgtcgccgaacaccagcaggtgcgccgtggcgctgtgctggaaatgaaaatggatgccctcctcgcagcacaggcgctggacgaactgcaggtcgctctcgtcgtactgcacgcagtattcgcgctcggggtagcgggtgccgagctggaagcggtaggcgtcggcgaggatgccgtgttcctccagcacccgaccgacgatctgcggcaccgtgaggtgctggaagatgcgctggttggtgcgctgggcgaggtaggccagttgcgggacgagggtgatgcggtagcgggtcaggcgcttgcccgagtcgccctgtccggcgctgcgcaccaggccgtggataccgttgccggcgggcccgagggtaaggaaggcgggtttgtgcagcaggctttcgaggtccggcacggggcgttcgccgaccagctccaggtcgaaggcgaacggctggctgatggcttcgcggccgctgaaggagagcacctgcaggtcgagggcgaggccgtcgatggcgaggctgaaatgggtctggttggctgctgcgaacatccgttgtccctcactggcgcaggcgaccgattcgattgtcctgcctggcgcgggcgagacaagggcgcgcaggctcgatcggaagctgcctacaacaaacaaagcggcatcgacccggcgcgggctttcctggccacggcgctatgggtcatcgcgggcacgacggccagcgaggctggccgcgtgcggcggtcgcggctcagccggcgaccggggagcgccagtcgtcggagccggaggtgccggagacttcgtgggtccaggtaatcttgcggtaggtgaagtgcacgtcttccaagtgggtgaagtgggcgttgcccgggtcctggcagttgtgcatgtagtccttgatgtcgacgatgatcgcgtcttccaggacggtggtgtagtagtgctcctgggtgccggcggcggaggtgcggtaccactggatctccaccttggtcaggcgctcgccggaggtcagggcggccagcagcagcggcgaggccttgtcgaagaccttggtgatgaccaccggcttgtgcacgcgctggccggtcggctggccggactgcgggtcgcgcgggatgatcacttcgtggttgaagccctggaccatcacctggtcctcgtggccttcctggtaggtgttgccgaccgaatcctcggtgaaggcgccggcggtgatcaggccctgcttggtgccggtgatggacatataggcgggggttgccatggatgcattccttgtcagtggtagccgggacgacatgtcctggtgcggcagctacccaacaagcttcgtgccaataaaatatttaccttttaaatcaaattcttgaagaatctcccggcccgcacgaacactttcccctgggtttaccccgaaaaagtgagcaagttgttgcacagtgctatgcaagaacttgctcacttcatcgaagaccccgtcaggccttggccccagcgtggtatccacagcttttcccgaagttatccagcaaaaagttgcacacctgccgagtgcctcagagccagttcttgaacttgaaccagaggtacggaaggatcgccgataccaccatcatccccagcgccatcggatagccgatggaccagtccagctcgggcatgtccttgaagttcatgccgtagacggtgcccaccagggtcggcggcaggaacagtacggcggcgatggagaacaccttgatgatgctgttctgctcgatgttgatcaggccaagggtcgcgtcgaggaggaagttgatctcggtggacatcttcgccaggtactcgtccagcgagcgcacatcgcgctccacggtcttcgccagcaccttggccggctcggaaagccagccgttgcaaccctggcggaaatagctgttcatccgattgatgctgagcaggctgtcgttgagcttggacagcagcgagctgctgcgcccgaggtgcttgatgatctgctgcaggtcggtcttcggcttgcgggtctgggcggtggactcggcgaagatctcccgcgacatgctgctcagttgcccctgtacggcctccaacacgtcggcgatgcggtccaccaggctgtccatcatcagggcgaacaactgggtgctgctgcggttggcgtcgagctggcggatgcagcggttctcgaactcgcggaacgaacgcaggtcggcgtagcgcacggtaatcagccatttctcgctgaggacgaaggtcacttcctctgtgctcggccggtgctcggtgatcccgccgaccaccgaagtggtcatgtagaggacgttgccgtcctcgtagaagcgcgacgaatcctcgatctcggccatctcctcgcgggtcgggatgttcacctgcaggtgggattcgagcaggcgctcctcttcgggggtcgggtgatgcaggtcgatccacagggtgcccggcggcaacccccgctgggcatcgtcgtgctggcgtcgctccaggcggtcgccggaaaggatgtaataggtgatcatgtcgggtatcgctaccttcgcggccatccgttggccaagcagggtggacaacttcccgccgccgcacaagcggtactttgcgccagaacgaggaacgcccgatgagcgaacaggacgacaaccaggaagacggcttcgccgaggaaaaactgatccaggccatcgagaaccagatcgaaagcgagaatccgccggcggcgcgcgccgtgttcaacaagctgaccctggtcggctacgagcgcgacgaggcgctgggcatgatggcctacgtgctggcccacgagatcaacgccatgctcgccgccgaccgcgctttcgacagcgccggctacgagcatgcgctgcgtgccctgccgacgttgccggacgacgaatgagcggagccgggccgactggtgccggcgaatgcccctcgtatccatgcggttttgtttcgccaaacgcctgccgctctggtagaaaggtggcgcccactctccgtgccacctgctttcgcggagcgataccggatgcgatcctggttccacttcctgcccatctgcctgctgctggccctttccggcccggcagcggccgtcccgacagaacccctggtgctcggcgccgaagacgactggtatccctataccgcctacaaggacggccgcatccagggcatgagcgcggacatcgtgcgggccgccttcagggctgcggacacgccggtccagctcaatccctacccctactcccgctgcatgaagctggccctgaaaggcttgatcgccggctgcttcaatacctcgccgaacccgcacatcctcgccgactaccgtctgccccggcatccgttgttccgcgcggagatccagctctgggcgcgacgcgacgaagcgcggccggtgaatgcggagcaggcgctgagcggacggaaagtcgcggtgaccctcggctatgaatacggcgacggcttcgatcgccgccacgacctggtgcgcatcccggtgcgcaaggactactacggtttcctcatgctccagcgcggccgcgtcgactacgccctggcctaccgcaatacggctcgccagttgttcagcgaacatcccgaactggaaggccagttccagccggtggccacggtccaccgcccggagctgtacctgtcgttctcgcgccgccacccgcaggccgagcatctgctcgaacgcttcgacctcggcatgcagcgcatcctcgccagcggcgagtaccagaagatcctcgacggctggagccaggccgccgacgctacgccctagtccaactacactcaccggtgctcaacaccgcaaggagccgacatggccttcactcccgagctgatcgacgaactggaactgctggcgctcttcaacctgaacaacacccaggaaggactcaaggtccatcacaccgccgacggcaaggccgtcgccgccgcccgacgcctgcacgacaaggggctgatcgaccagcccgacggcggctacctgaccagtctggggctggacgccgcggagcaggcacagggcctgctgaccatcctcaagggttgacggaagcggccatcgcgacctgctcccgacaggccgcgacggttgccccggttcgcggtgcggtgctcaagccgccgcgcttccgggcgatacaatggcatgaccggagccaggcacggcgcctggccttgcctgtgcccggacgcccatgaaccgacaccccgcactcagcctcgatctcgacgatggcatcgaccgcaaggtcctcggccagttgcgccaacgcttcctggcggtcaatgccggtcgcctgcaacgcgcccggcaggcgttgtccagccgccaggagcgggtcctgcgcctgctaccgctgctgttccacatcaaccatccgctgctgccgggctacctgtcggccagcacgccagcgggcctgagcggtttcgaggcggacgacgaagtactcgccgaagcccagcgcctggcccgctcgtttgtctacaagccacgcaggcaagaacccgcacagcagccgatccacggcctgttcctgatgggcagcctggggagcctggcccaggaggaacagagcgatctcgacctctgggtctgccatgccccagaactggagcccggcgcgcgccaggagctgcgccgcaagtgcgcgttgatcgaggactgggcgcgcagccagggcagcgaggtgcactgtttcctgatcgacgtcgcccgtttcggccaggacgaacgcaaagactggaaagagtccggcggcgacggcaatacccagcacttcctgctgctcgacgagttctaccgtagcgcgatctggctcggcggacgcacccctctatggtggctggtgccgccggcccatgaacggcgctacggcgaatactgccggaccctgctcggcaaacgcttcatccgcgccgaagaggtgctcgacctcggccacctggcgcacatccccgcccgggaattcatcggcgccggcctctggcagttgtccaaggccatcgattcgccctacaagtcgctgctcaagctgctgctcaccgaagcctacgccagcgagcacccgcgggtccgctgcgtcgccctgcgcttcaaggagcaggtattcgccggccagctcgatctcgacgaactggacccctacgtcctggtctatcgccatctcgaacgctacctgcgggaacagcaggcgccggaacgcctggaactcgtgcggcgctgcctgtacctcaaggtcgggcgcaagctcggcggtcgccagcgccaggcgcagaagggctggcagcacctgtcgatggagcggctcgtcgcggaatggcaatgggagcctcgccgcttggccctgctcgacagccgcagccagtggaagatgcgccaggtgatggaagagcgtcgcacggtggtcaacgaactgacctacagctaccgcctgctgttccagatcgcccgccagcaaggcgctgacagcggcatcgacagccgtgacctgggcctgctcggccgccgcctgtatgccgccttcgagcgcaaggcaggcaaggtggagaacatcaacccggggatcgccccggatctcggcgaagacgtcctgaccctggtccagctgcccgccgacgacgaccgcgagcaggcgcagtgggcgatcttccccggtgccctgggcgctcaccagtggcctgactacgcgccgctgaaacgcagcctcaggctggtcgagctgctcgcctggtgccatcgcaacggcgtcatcgacagcgccacccggctgtccctgcatcccggccagagcgacctcggcgatgccgaactggacaatctcctgggcagcctgcggcagtttctgcctgtccccctggcgaccgtggacgacgccgacctgctgcaaccgcgtcggctcaagagcgtcctgctgctggtcaacgtcggtgtcgacccgctgcgccaccacagccagatgaacctgcacatggctaccgggcgtaccgacgtgcttggttatgccggggtgcgcgacaacctggtgctgaccctcgaccagctcagcctcaacagctggaacgaactgacggtgcgccattacgcaggcccccaggcgctgcccgagtgccttgccgagttcctcgacgccgtccgcgaaaagcccggaagcccgccgcagccgcctgaactgatggtgcgctgcttctgtcgcaaccgggccgccgccatcgccgtgcgggtcgaagagctgttccgcgagacctacgggcaactgcttggcggccagccaagccgctacctgctgcagatccgccagcagtaccacctgctggaaatgtcgccggaagcggtcagccacgagagcctgcccgacctgccgagcctgctccagcacctgggccgcgagcgagatggctacagcgccctgaagctggatcgtcacgccctggagggcgaggacctcgggctgatcctgtccatggggcggccggactgcatccaggtgttctaccggcgcgacttcgacagcgccgagatcagcctgctcgacgaacgcaacgccctctggcgccagcgccaggcattgcgtgacgaacgcagcctgctcgcaccgctgcagcgcttcctgcaatcgctgctgtaccggcgcaacgccctgtcgctggcggaacaggtgccggccgcgctggatatccgctactacgagttgctctccaacgacggcagagtgcatgtcgagcctcgcgaggcgccggaggccctggccgggcccgcgctgtacgagctacaggcgctactcgagcgcggcgaacgcaagcgcgtgcaggtcaccctgtactgcgaccaccaggagttttccgaactggagtacggcgccggcctgttcaaggcggtcgcccggcatatcctggcgcatcgcgcggaaagcgaaccctacccctgctacctgaccgacctcgacctgtcgcggctgttcgccgacgaacagccgcaaacgctgcactatctgcgttataaaagcgtcctggaaacggcgctgaaccaggcgctgctggaacaatgacccagcgccgcaccgcgcggggctcgacaaggacgtacggatggcactcctcggtattaccctgctcgctggcgccgcattcgtgggcggctatctctaccgccgcggcctggatcgccggcgctaccgcttcatccagcaattccgcctgccgccgcgggtcgcccaggcggtccgcgagcgctatccgcagctcagcgaggaacaggtccaacgggtgctcggcggcctacgcgaatacctgctgctatgccgcgccgccggcaagcggatggtcgcgatgccgtcccaggtggtggatgtcgcctggcacgaactgatcctgcatacccggctctaccagcacgtctgccgcaagggactcgggcgcttcctccaccatacgccggcccaggcgatgcgcagcccccgacaggcccaggagggcatccagcgcgcctggaagctggcctgccgccgcgagggcatcgacccactgaatcccacgcgcctaccgctgctgttcgccctcgacacggaactggcgatcgccgacggcttccgctacgccctgaactgcgcgcagcggcaagacggcggcgcagcggtgtattgcgccagccatatcggttgcagcagcggctgcgccagcgatagcggcagtaccttcggttcggacggacaggattcgcgccacggctgcggcggcgatagcggcggagacggcggcagcggttgcgggggtggaggatgcgggggcggtgggggcgactgagggtcgcgaagcccgtcgccgaatggcgacgggcgaaaaccgatcagcgcgcgtagtcgccggcggcttccggctggtattcgatttccagcagggtcagcttcagcgtcttgccgctcggcgccggccagtcgatggtctggccgatggtcaggcccagcagcgcggtgcccaccggcgcgaggatcgagaccttgccttcgccggcgacgtcttcgggatagaccagggtcagggtgtactccttgccgctgctttcctcgcggcagcgcacggtggagttcatggtcacgacgcccggcggaatctcgtcatgccccaccacctgggcgcgcgacagttcggcctccagcgcctcggcggcgggtccgaattcgtccaggccatccagcaggcgctccaggcgctgcaggtccagacgagtgatggtgatcggcggcgtgctcatgatcgcaggcgtgctccttggtccggttcggttgatcgatgaaaagcaggaatcgcaaaaaagcaaaaaccccgcccgaaggcggggttttcccggacactaacacagtcgcaggaattagcaacatcccccctatcaggagagacggcccgccagcgactggcgtcgagcggcctgtgacctgatctgcaagcggcgggaatcgtcggccttgccccactcgcggatttccgccagggaacgtccgcagccgacgcaaacgtccgcatcgtcgaggcagcacaggcgccggcagggcgaggccaccgccggcggcgaagcctcagaggccggggaactcgacatcctcgcccccctgctccagggtcgcccggttgagcagcgcgcccagcggttcctggctgccatcgtggcgccagaggccgctggcctcgtcgtaatcgaagtggaagccgcccgacttcgcagccacccacagctggcgcaacggcgcctggcggctgaggatcagctgcgagccgttctcgaagcgtacggtgagcacgccgccggcgttctccaggtcgaggtccaggtcgctgtcatcgaaggcgtcttccacctgctgctggagcgcatcgaccaggtcgtggaaacgcgcttcattcatcgtactcatgcattgcctcggcattcgctaacgggaaaaaaggcggacgactaccttcgtcttgccctattccgacaattctacgctggtattgccgtagtccgcgctgttttgccgcgacgctcgcggaaaacgccggcatcccctctgccgcaggccattcccctgcaagccccggcacacctgatccggctcgcataggcaaggcgccggggggtcggtatactccggaacaattcacgttttctacaaggattccgtcatgaagcggctgttcctgtccttcgtcgcgctcgccctcctcgccggctccatcgccgcctgcggccagaaaggcccgctgtacctgccggacgacgaaaaagccaagaaagaacacagcaaagaccgctacggtttctgagagagcgcccatggacacattcagttaccgcgacggtgagctgttcgcggaaggggtggcgctttcccgcatcgccgagcgtttcggcacgcccacctacgtctattcccgcgcacacatcgaggcccagtaccgcgcctatgccgatgccctcgccggcatgccgcatctggtctgcttcgcggtcaaggccaactccaacctcggggtgctgaatgtgctggcgcgcctcggcgccggtttcgacatcgtttcccgcggtgagctggagcgtgtcctggccgccggcggcgatccggccaaggtggtgttctccggcgtcggcaagacccgcgacgacatgcgccgcgccctggaagtcggcgtgcactgcttcaacgtcgagtccggcgaagagctggagcgcctgcaacgggtagctgcggaactcggcgtgaaagcgccggtatcgctgcgggtcaacccggacgtggacgcccagacccacccctatatctccaccggcctgaaagagaacaagttcggcatcgccatcgacgaggccgaggcggtctacgcccgcgccgccgagcttgaccacctggaggtgatcggcgtcgactgccacatcggctcgcagttgacccagctggagcccttcctcgacgccctcgagcgcctgctcgggctggtcgaccgcctggccggcaaaggcatcggcattcgccacctggacctcggtggtggcctcggggtgcgctaccgcgacgaacagccgccgctggccggcgactacatccgcgccatccgcgagcgcctgcacggccgcgacctgaccctggtgttcgagccgggccggtccatcgtcgccaacgccggcgtgctgctgacccgtgtcgagtacctcaagcacaccgagcacaaggatttcgccatcgtcgacgcggcgatgaacgacctgatccgcccggctctctaccaggcctggatggacgtgcaggcggtacgcccgcgcgacgccgcgccgcgccgctacgacctggtcgggccgatctgcgagaccggtgacttcctcgccaaggatcgcgacctggcgctcgccgaaggcgacctcctggcggtgcgctcggccggcgcctacggcttcgtcatgagctcgaactacaacacccgcggccgcgccgccgaggtgctggtggatggcgagcagacccacgaggtccgtcgccgcgagaccgtccaagagctctacgccggcgaaagcctgctgccgcagtgaggcccagaccatgcttttgcgcttcaccaagatgcatggcctgggcaacgacttcatggtcctcgacctggtcagccagcacgcccatgtgcagcccaagcacgtcaagctctggggcgaccgcaacaccggggtcggcttcgaccagttgctgatcgtcgaagccccgagcagccccgacgtcgacttccgctaccggatcttcaacgccgacggctccgaggtcgagcagtgcggcaacggcgctcgctgcttcgcccgcttcgttcaggacaagcgcctgacggtgaagaagagcatccgcgtagaaaccaagggcggcatcatcgagctgaatatccgcccggacggccaggtcacggtggacatgggtccgccgcgcctggccccggccgagataccgttccaggccgagcgcgaagccttgtcctatgagatagaggtgaatggccagcgcgtcgaactggccgcggtatccatgggcaatccccatggcgtgctgcgcgtcgagaacgtcgacagcgcaccggtacacagcctcggtccgcaactggaagtccatccgcgcttcccgaagaaggccaacatcggcttcctccaggtgctcgatccgcaccatgcgcgcctgcgcgtctgggagcgcggcgtcggcgagacccaagcctgcggcaccggcgcctgcgccgcggcggttgccgggattcgccagggctggctgcaatcgccggtgcagatcgacctccccggcggccgcctgcacatcgagtgggcaggtcccggccagcccgttatgatgaccgggcctgccgtccgcgtgtatgaaggccaggtccgcctgtaagggccgtcgcccgcgagaaccgagacgcttatgaccgagaaaagccaggaaccgacagcagcgctggacgccgagcaggtggccgcctatctgagccagcacccggagttcttcgtcgagcatgacgagctgatccccgagttgcgcatcccacaccagcccggcgacgcagtgtcgctggtggagcgccaggtacgcctgctgcgcgagcgcaacatcgagatgcgccaccggctctcgcaactgatggacgtggcccgcgagaacgaccgcctgttcgacaagacccgccgcctggtcctcgacctgctcgacgccaccagcctggaagacgtggtcagtaccgtcgaggacagcctgcgccacgagttccaggtgccctacgtgagcctgatcctgttcagcgacagtagcgtctcggtgggccgctcggtgagcagcgcggaggcgcaccaggccatcggcggcctgctctccggcggcaagaccgtctgcggcgtgctgcgtccgcacgaactggcgttcctcttcggcgagagcgaccgcgacgagatcggctccgcagcggtggtctccctgagtttccagggcctgcacggcgtgctcgccatcggcagtcccgatccgcagcattacaagagttccctcggcaccctgttcctcggctacgtcgccgaggtcctggcccgcgtgctgccgcgtttctcctcgccgctgcgctcggtccgctgagcgcggcgggcggtccgagatgcgcgccgacctggatgccttcctcgaacatctgcgcagcgagcgccaggtctccgcgcacaccctcgacggctaccgccgcgacctgctgaagatcctcgccctcgccgaaaaggccgggctctccgactggaacgccctcgacacccgcagcctgcgcaccttcgtcgcccgcctgcaccagcagggccagtccagccgcagcctggcacggctgctctcggcgacgcgcggcctctaccagtacctgctacgcgaagggcgctgccggcacgaccctgccaacggcctgagcgcgccgaagagtccgcgcaagctgcccaggaccctcgacgccgaccgcgccctgcaattgctcgacggtgccgtggaggatgacttcatcgcccgccgcgaccaggccctgctggagctgttctattcctccgggctgcgcctctcggaactggtcggcctcgatctcgaatggctggacctcaaggaaggcctggtgcgagtgcgcggcaagggcaacaaggtccgcgagctgccggtcggcaaggccgcgcgccaggcgctcgaagcctggctgccgctgcgcacccaggccgctccggaagacggtgcggtgttcatcggccgcagcggcaagcgcctgacgccacgggcgatccagctgcgggtgcgccaggccggcgtccgcgagctgggccagcacctgcacccgcacatgctgcggcactccttcgccagccatctgctggagtcgtccggcgacctgcgcgccgtgcaggaactgctcggccacgccgacatcgccacgacccagatctatacccacctggacttccagcacctggcctcggtctacgaccgcgcccatccccgcgccaagcgcaagggcaacgccgatggaggcaacgacccatgagcagcctgcgactgatcaccttcgacctcgacgacaccctgtgggacgtcgccccggtgatgaacaacgccgaggccctgctccgcgaatggctggcgagcaacgcggcgcgcctgggtccggtacccatcgagcacctgtgggcgatccgcacccgcctgctggatcgcgagccgatgctgcgccaccgtctcagcgagctgcgccggcgcatcctgttccatgccctgctcgacgccggttatccacaggcggaggcggaaagcctggccgaggccggtttccaggtattcctcgaagcgcgccaccgggtcactctgtttcccgaggtccacccgaccctggagatcctcgccgaccgcttcaccctcggcgtgctcaccaacggcaacgccgacgtgcgccgcctgggcctggccgactacttccggttcgccctctgcgccgaggaactgggcgtcggcaagcccgacccgacgccattccgcgaagccctgaagcgcgccggcgtcgaggcctcggcagcggtacacatcggcgaccaccccagcgacgacatcgccggagcgcgccgcgccggcatgcgtgccatctggttcaacccaaacggcaagccctgggccggggaggaagagccgagcgcggagatccgcagcctcgccgagctgccggccctgctcgcccgcctgcaatgacggaccgggcccccggtcgcgggtagcgccctaggcacgcgaagcgctggccttgaagcgcccgaccccgcgcaagatggaaaacgccaccgcaaccgcagccaacgtcagcgacacgccgaaaagcagcaacgccgtcgacgcaccgaagcgatccgcgatcaacccggtgaagatcaccggcaggctgaagccgaggtaggccaacaggaagtagcccgcgctggcccgcggcttttccgcaccggccaggacattcaccgccgacagcccgcccaggtaggtgaagccgtagcaggaactgctcgcgcccagcgcaccgaacagcaccgcagccaatgagccgtggatcgcgccccaggccagcagggcatagctcggcggcaggatcaccagccccaggcaggtcgccgaggccggcgccatccgccgcgccagcggctggaacagcaggccgcagctgatcacggtgaaggtcgagaagcccgaccagcgcgccagcccgtgggccgccagcagcgaaggcaggaccgcgatgaccagacccacagtggcccatgccagcaggatcgagagaccgtacggcaggctgccggcgggaaagaacggcagccgcagcatcggcgtatcgcgcccgcgcggcgcctcgtccggcaggcccgccaccgccgccagggccacgcaggccagtcccaactggacccagaagctgccgggcaccaggctctcccggaacagcaggaacagactggtcagtgccgcgccgaggccgaagccgagcgaggtgctggcggtcacccagttggccgaggtgcgggaatccccgcccgcgatcagttcgctcatgtaggccgtcccggtggccgatgccagagccgtgccgacgccgagcaacaggcgcgccacgccgagcgcctccaggcgcggccagagcgccatcaccagggtggccaccatcgacagcagcagcgcgacgacgatcggcggcttgcgcccgatccgatcggacaacccgccgagtaccagcagcaccggcagtacgccgagcacatagccggagaaagcgctggcggtagctgccgcgccgtaaccggaaagctccgcgtaggcggtgtacagcggcgcctggaggttcaccgccaaggtgatcaggcacaggccgaaggccaggcatgcggcgtggcgacgggtattgctcatgcgtttctccgttcaagggcctgccgcggcagagcggtgggcattggctagcccgcgagaagaggcgtcgactatccggcgcggcggcgctacggaacaagtaacagctgttcggatttgtgcttaactgttcgccccaaaagaccaaacagtgagtcaggcatgcacctccggatcgaccgcaatgccagcgagccgctggtgcagcagatcgtcgcaggggtcagcggctggatccgcggcaatcgcgtccgcgccggcacgcggattccgtcgatacgccagttggccagggaaaaccagctcagccagtccagcgtgatcgaggcctacgaccgcctggtcgccctggggatgctggaatcgcggcacggctcggggttcttcgtcgccgaggcgcccgccgccactaccgacctcgacagcgaatggcacgaaggcgcggaaaacgcatggggccagttcagcggcaactcgacgaaactcaagctcggctgcggctggattccggacagttggcgggaagtcgaggaactcagctacgcgatccgccaggtcgcccgcagcgaactcgccgagctgttcgactacagcactccgctgggcctgccggcgctgcgccagcacatccagaaacgcctgcggctgatcgatatccatgtcgacccggagcagatcctcaccaccaccggcgccagccatgccctcgacctgttggtacgcacgctgctcaagccgggcgacgtggtggtggtggagaaccccggctactacaacctgttcaacctgctgaagttccacggggtgaagatgctcggcgtgccgcgcacccgccacggcccggacaccgccgcgctggagacgatcctccgcgcgcacaagccgaagttccttttcaccaacagcatgtaccacaaccccaccggcaccagcctcagcccctcagtggcccaccgcgtgctgcaactggccgagcagcatgatttccacatcgtcgaggatgacatctacgccgacttccagaacggccccagcacccgcctggcaaccctcgattcgctgcgccgggtgatctacctggcgagcttttcgaagaccctcagttgctcgctacgggtcggctacctgatcgccggccccgagctgatccggcgcctggcggatgtgaagatgtacaccagcatcggcagccagcgcttcgccgaatgcgtggtctcgaccatgctcgccaacggcagttaccgcaagctggtgcaacgcctgcgccagcgcctgacccggcagatggcggcgaccctgcgggtgcttggggacaacggctgggaggtgttcgccgaaccggtcggcgggatgttcgtctgggcccgtatcggcgactacccgttcgccgaattgcaggccgtggcgacacgcctggacgtgctgctgtcgccgggcagcggcttcagcccggaaggcgaggagagcgactggctgcgtatcaacatcgcctatgccagcgacccgcgggccctggcgttcttcgaggcgttcgggtgaggcgcgctcttgccctcccctgcctcactggtagtcgagcaggatcaccatcgcggccaggaccgagccgggcgtgattttctcggcggtctgcacataggacgctttcatcgggatccagtacgccccgccggtgttcttgtcgtacgcggtcaccggcaacgagagtcccatccgtagcggaacgccggcctcgtcggtgacccggatcgatacgccggtcgcggtgctgcccgccaggcgcggcaatacacccgagccttcggccaccgcgccccccaccgcttgaaggctgtagccgacgcggttgtacccgcgaggacagccggccactacgagattgaacggggtaacggccgcgtaggtgccgacgccgttcagccgggcggcagcgatcgactgcagcttcacggtctggtcggcgacctggcaggtcgcattgatcgtggtgacgctcccggtcaacctgatggaggaggtgccagacgcaataagcccgtccttgtaggtaatgaggaagtacgagttgaaggctccgctcgcgaactggccgtcggagagcggcgtcgagttgcggaacaactggatctccgcgatttgcgagaaagtgcccttgaaacggctgctcgccggtatgccatccagcagcaggcgcaccgagaggcccggcacgttggtattcaggtccggaccatcgatcgggtcccagacacttcccttgttgtacagagagacgccgatgagatcgcagctgggcttgccgcacagttgcatgggagtgaacgtgtagcgcgacatgacacttccctcgggaaggatcgagggcacggcgatatcgcggccgccgaaagcgtacagattggcagccatgctggtgccggcgggaacgaacaggactgccgcaagcagcagggttcgacggaacgtcttgaactccatgggatgacaaccgatgtgtccggcatgtccgggaaaatccgccggaaccggagtgaacttgatgggtggataatcttttcagaacacctggaaaggagccataagacaggacctacacggctccgcgaatccgcctaagaatcgctaggaaaattcttaagcaagctctacagctcgctctccggcaaccccggacgccgcttggagcgcctggatggcaagcagcttcggttgacgatgtggaacggtagcgctgccaccggaaaggaaaaggccttggcccgtcgccagccgtgcctgaacaggcgaaagatcggctcgccaaccgggatgcggcggcctgtcaaagtgaccggcgccatagcacaaggcccgccatcccttgcaggaggcgggccttgggatggcgcgaaatcagatggggcggctgccgtacttgctgtccggcttcttcggcggatcggccaccacgttgggttcgatctcctgcacctttccaccgcgggaaaggaactcctccatcgccttggcgagggcgtcacgctctttctgcttggcttcgaccgagggcagctcctcttccaccacggcggctttcgccttcttcccgggggcgggggcctcgtcgccgtcgccgctgtccgcttcgccgtcgtcggccgcggccagctcttcgccgtcgtcctcgtcagcgccgtccagctcgtcctgttccagttcttcttcgctcatggtcaacctctcggtgctgcaaaagcaggttagttatagcccagccgcgcgttttgatgagcgccgccggaaaaaattcatactgactcgccctgccaggtggcgagcacgcgccgtgccccgcccctgtcccggtgttcaccgagatagatcccctgccaggtgcccagtgccaaccctcccgactgtatcggcagggtcagttggcagcccagcaggctggccttgaaatgcgccggaaggtcgtccggaccttcgtcgttgtgttcatagccgacttcgccgcgtggcgccagccgctcgaaaaaacgctcgaaatcccggcgtacggcaggatcggcattttcattcagggtcagtgaagccgacgtatgttgcaaaagcaggtgcagcaggccgacccggcaccgccgaagctccggcaaggcgtcgagtatctcctcggtgacgaggtgaaagccccgcggacgcgggcgcaaggtgatcagggtctgctgccacatgctgctgttccaaatcggctccgatccgtcgcgccgcgcattctagcgcggcatttgaaaaagcaaagagcgtaagaggcagacctgtgaaagctgatggtggcgcagtccgctggcagtcactgaaagaccggttgcggaaaggtggcggcagtcgcgggaagcgccctggactttcgacgcacaagggcatggcgttcggcgaaggcgagcgcgggaggcaaaccgacgcccggcggaaagccgggcgccggcaggtattacaggttgtagccgcgctcgttgtgcagcgccaggtcgaggccgaccgcttcctcttcctcggtgacccgcaggcccatgaccaggtccagcaccttgaggatcacgaaggtcaccacggcggtgtagaccacggtgaaggccacgcccttgaactgcacgaagaactgcgcgccgatgtcctccacgctgccgaagccgcccagcgacggcgccgcgaagatcccggtgagcagcgcgccgacgataccgccgaccgcatgtacgccgaaggcgtcgagggaatcgtcgtatttcagcgcgcgcttgagactggtggcggcgaagaaacagatcaccccggaggccaggccgatcaccagcgcgcccatcggaccggcggtgccggcggccggggtgatggccaccagaccggcgaccacgccggacgcgatgcccagggcgctcggcttgccgtgggtgatccactcggcgaacatccaggccagggccgcggcggcggtggcgatctgggtcaccagcatggccatcccggcggtgccgttggcggcggcggcggaaccggcgttgaaaccgaaccagccgatccacagcatggccgccccgaccagggtgtagccgaggttgtgcggcgccatcggcgtggtcgggtagcccttgcgcttgcccagcaccaggcaggcgaccagaccggcgataccggcgttgatgtgcaccacggtgccgccggcgaagtccagcacgccccagtcccacatcagggcgccgtcaccgctccagaccatgtgcgcgatcggcgcgtagaccacggtgaaccagaccgccatgaagatcagcatcgccgagaacttcatgcgctcggcgaaggcgccgacgatcagcgccggagtgatgatcgcgaaggtcatctggaaggtgatgaacacgctttccgggaacagcgcggtggcggaagtcaggccgtcggcggtgagaccgctgaggaaggccttgtccagtccgccgacgaaggaattgaagttgaggacgcccttctccatcccggtggtatcgaacgccaggctgtagccatagaccacccagagaatggtgatcaggccggtgatggcgaagcactgcatcatgatcgacagcacgttcttcgctcgcaccatgccgccgtagaacagcgccaggccggggatggtcatgagcaggacgagcgcagtggagatcagcatccaggcggtgtcgccgctgttcaggacgggctcctcggcggccagggcgacgcccggcaaagcgagggacaatagggctcctagccctgcgatcttacgcagagtcatgttggtattctcctggggcttttgggggttcggttgggcttagatcgcgtcggtatcggtttcgccggtacggatgcggatggcctgttccaggttcaccacgaagatcttgccgtcaccgatcttgccggtattggccgccttggtgatcgcctcgatgacgcggtccagctggtcgtcggcgatcgccacgtcgatcttcaccttgggcaggaagtcgacgacgtactcggcgccgcgatacagctcggtgtggcccttttgccggccgaaacccttgacctcggtcaccgtgatgccctgcacaccgatctcggacaacgactcgcggacgtcgtccaacttgaacggcttgatgatggcagtgactagcttcatgaaactctctcccgtgtttggtggactcgccccaggaaaacgaacccgaggacagtctaagcgcagtgtctggctttgtaacgcgccggtccctctgggaagcatgatcgggatcctccgccccgacctggccctgctgcggccgttcgatgccgcaacctgccggcctcccgcaaccgcctcatctgccgcaccggtactgcttcagtgcacgcctcaccccggccaaagcagaaagcttgccagctccggcaaatccgccggatttcaagctcttagccgccaacccggggatagtgcggaacgccgggctccgggcggcgcaccaaataggcgcagacgcgctccgacagttgcgcaaaaagtgtgcaatggccctcccgcgagcgccgccgacatcgtgctagactgccgcccactcgttaccggaaccctcgccatgctgccgcccaaagccgtcttcgaagccctcagccaacaagccagccgcctgttcgccggcgaatcgccgttgcccaaggccgagctggagtcgcagttccgcgccctgatgcagagcgccttcagcaagctcgacctggtcagccgcgaggaattcgacagccagatgctggtcctcgtccgcacccgcgcacggctggaagccctggaggccaaggtggcggaactcgaaagcaagctgacgccgcccgccgactgatccttccccctgcgagcggcgtgagatcaaggagcgatccatgtccctggcgattgtccacagccgagcccaggtcggcgtcgaagccccctgcgtcagcgtcgaggcgcacctggccaacggcctgccttcgctgaccctggtcggcctgccggaaaccgcggtgcgcgagagcaaggaccgcgtgcgcagcgccctgctcaatgccggtttcgacttccccgcgcggcgcatcaccctcaacctcgcccccgccgacctgcccaaggacggcggtcgcttcgacctggccatcgcactcggcatcctcgccgccagcggccagttgcccggcaccgccctcgacggcctggagtgccttggcgaactggccctgtccggggcgatccggccagtgcgaggcgtattgccggccgcgctggcggcgcgcgacgcaaggcgcgttctggtggtaccgaaggaaaatgccgaagaggccagcctggccagcgggctgacggtgttcgccgtggaccacctgctggagatcgccggacacctctccggccaggccccgctgctgccctaccaggcccgcggcctgctccgcgcgcccttcccttatccagacctggccgaggtccagggccaggccgccgccaagcgcgccctgctggtggccgccgccggcgcgcacaacctgttgctcagcggcccgccgggcaccggcaagaccctcctggccagccgcctgcccggcctgctgccggcgctcgacgaggacgaggccctggaggtcgcagcgatccattcggtggccagccacgtccccctcaggcactggccgcagcgaccgttccgccagccgcaccactccgcctccgcgccggccctggtcggcggcggcagccgcccgcagccgggcgagatcaccctggcgcaccagggcgtgctgttcctcgacgaactgccggagttcgagcgcaaggtcctggaggtcctgcgcgagccgctggaaagcggcgagatcgtcattgcccgggccaacggccgggtacgtttcccggcgcgcttccaactggtggcggcgatgaatccctgtccctgtggctacctcggcgatcccagcggccgctgccgctgcaccccggaacaggtccagcgctaccggggcaagctgtccggaccgctgctcgatcgcatcgacctgcacgtcagcgtgctccgcgaaagcaccagcctgcagccaggacacggcgaaaccgctaccgccgagatcagcgaacgggttggcgccgcacggcaacggcaactggcccgccagggctgcgccaatgcccatctcgacctccaggcgatgcaccgcaattgtgcactcgccgaagcggaccgccgctggctggaggctgccggagagcgcctggaactttccttgcgcgccttgcatcgcatactcaaggtggcccggacgctggccgacctggagcgcatcgatgccatcgaacgccggcacctggcggaagccctgcagtatcgggcaacgacctccacgtgaagcgtaataattcagcaaagctatcgattaaggctttccgaatcaaattagctatcacgatgtgttaggctgtttcgtcttccgccttcggcgggcaatccgatcacaaggagagctagcttacatggagacacccactaccccccggagcaccctgaatcctccggtcttctatacctccgccgccctgatcctggccctggtgctgttcaccgtgctcctccaggaagaagcgcaatcgctgttcaaccacgtccagcaatggatcatcaccaacgccagctggttctacgtactggccgtggcgctgatcctgatcagcgtggtgttcctcgccgtcagccgctacggcgacatcaagctcggccccgaccacagtcgtcccgactaccgcaacaccacctggttcgccatgctgttctccgccggcatgggcatcggtctgatgttctttggcgttgccgaaccggtgatgcacttcaccaccccaccggtaggcgagccgaacaccgtgcaggcggcgaaggaagcgatgaagctgaccttcttccactggggcctgcatgcctgggcgatctacgccatcgtcgcgctgatcctggccttcttcagctatcgccacggcctgccgctgaccctgcgctcggcgctgtatccgctgatcggcgaacgtatctacggccccatcggccacgcggtggatatcttcgcgatcatcggcaccgtgttcggcgtggcgacttcgctcggctacggcgtgctgcagatcaacagcggcctgcaccacctgttcggctggccggtgaaccagaccgtgcagatcgcactgatcgccgccacctgcggcctcgccacgctctcggtggccagcggactggaccgcggcatccgcatcctgtccgagctgaacctgagcctggcggtgatcctgctgctcttcgtgctggtcctcgggccgaccgtgttcctcctgcagacctacgtgcagaacaccggggcctacctgtccgacatcgtcaacaagaccttcaacctgtacgcctacgagcccaccgactggatcggcggctggaccctgctgtactggggctggtggctgtcctggtcgcccttcgtcggcctgttcatcgcccgtatctcgcgcggccgcaccatccgcgagttcgtctgcggcgtgctgttcgtcccggccggcttcaccctgctgtggatgacggtgttcggcgataccgccatccacatggtcctgcaggagggcttcacccagttggccgaagtggtcaaccaggacagttcggtggcgctgttcgccttcctcgagcacttcccgctgggcagcgtgatctcgctggtggcggtgctgatggtggtggtgttcttcgtcacctcggccgactccggcgcgctggtggtggacatgctggcctccagcggcaaggaccactcgccgctctggcagcggatattctggtcggtgctgatgggcgtggtggccatcgccctgctcctcgccgatggcctcaaggcgctgcaaaccgcgaccatcgccagcgcgctgccattctccatcgtgctcctggcgtcgatctggggcctgttcaaggcgctgcacctggatgccaccaagcgcggcatccgctaccaggcgctgaccttctcccgccccaccacgcgcagcggcgcaagcgagggcgacggttggcagcgccgcctgcgcaacatcgccatgttcccaaggcgcagccacgtcaaccgcttcatcaccgatgtggcgcgaccggcctgcgaggacgtcgccgccgaactgcgcaagcagggctacgaagtccaggtgcaggacggcgaggacggccgggttcggctggaagtcagccacggcggcgaggtcgatttcatctacgaggtgcgtccgcgcgccttcaccacgccgagcttcgtgatgcgcgacaccgaggacagcagcgagtcgcgcaagtatttccgcgccgaggtccatctccaggaaggcggccaggactacgacatcatgggctggagccgcgacggcgtgatcggcgacatcctcgaccagtacgagcggcacatgcacttcctgcacgtggtgcgctgaggaatgcgggggccggccaatgccggcccctcgccgtttcgcctactggatctgctccggagtgacgatcacccagttcctgtccgccgtcaccggcaggccggccttggcctgggcggcggaatgctgcttgatcatgccgttgatctgttccatgtacttggccttgcggttgacccacaggtgcacgccgttttccgcggtgccgttgaacagcatataaccgtcgctgtccggggtatcgccggcgaccaggatcggccgcttccaacggtcgatgtaggtgaggatcgcagcctgcttgccggccatccaggtcgccggggtccacaggtagggggtcacctccaggtcgaggttggccttgggatcgtacttgccctcggcgatctgcttgcgcgcggtggtcagctcgccggtcttgcggttcttcagcagggtggtgacgccgatgacgttctccggcttggcgttgtagccatacctggggtccgccgcgaccatccgcaccagttcctcgtgggccgcgctgatcacgtagacctcgatgccgttttccatcagcttgttgtacagctcgcgctggccgctgaacacgcgcggcggctcgacgtcgagcgtggcgagcttgtcgccgtcgtaataggtggcggggatcggcttgccgtaggccatcagttcgtcgacatagcccttcagttccctgagggtgaagcctgagaacacctgggcgacccagggatagcagaccatgtcgtcgatctcgcaaagccggtagtagtagctgaacaggctctccttgtgcccggcctggtccttgaacgggatcagtttcagcgaagggtcgagcctgtcgcgggtcagcacgcccttcatttccagatagggcagcagcgattcttccaggtcgtagcgatagctggtgttgtccatgtcgaacacggcgtaggcgcccttgttcgcgttggcctcgatcagtgcattcagttgcctggcggcgggggccggccagtgctcgagttcggtggcgctggcctggccgactgcggcggcgagcgccagcgcggcgagtattcctttggcgaaggtcatggcgggttcctttgggcggttggaaggaagctccgtcccctgccgctcccgacaggcaacgaccaacgaccctagcgcaaaccctgcgcccggcccagcgacggcagcgacctgtaacgtcgcgtcagcgccaggagttgtccggcggcgtcacgccagccgctcgacgacgggcagacgcatcgccgccacctccgcgaggaggaagtcgcgcaatcgctggaagcgttcctgtcccctgcgggcgcgaggccagaccaggtgatagctttcgccgctggccaccgccaccggccagggcaggccgatgcggccctgggcgacatcctcggcgaccatcaccaggtcgccgatggacacgccatagcctcgtgcggcggcgacgatgcccagttccagcgtgtcgaacacctggccgcccttgagcgacacctcgtcccccagcccggtccgctgcagccagcgtcgccagtcgcgacgatccggcgtggggtgcagcagctcgctgtcacgcaggcgttggagggtccagggctccacggcctcgtcgggatcgcagaccggcaccagccattcggcgaacagcgctgccgtttcccattccgggctgaactggccgctgcccagcaacaccgcgcagtcgaaaggctcgcgctggaagtccaccgagtccacatccatccaggcactggtgagctgcacctcgatatccgggttcaggtggcggaagcggctcaggcgcggtagcagccagcgcagggtaagggtggaaggcgccttcaggcgcagggtggcgtcgtccacacgcagggcggtgcaggcccgttccagcgcatcgaagccgtcgcgcagcccgggcagcagcaggcgtgccggctcggtcagctgcaactggcggccatggcgctcgaacagacgacaaccgaagtgctcctccagggtacggatgtgccggctcaccgcgctctgggttatcgccagttcctcgccggcgcgggtgaaagaggcgtgccgggcggcagcctcgaaggcgcgcagggcatacagcgggggtaggcgacgggtcattggggaattacctctttcatgacttttactcatgcctggcatcttgtttttccttttgtggagccatgccagtcgcaccgagaatagccgcattctcaacgccgacaggccatcgcggcaaccatctcctcctgagccttactcatccatgtcctcgccatccctcgtcgaactcaaagccatcctgcgcctggcgggcccgttgatcgccgcccagctggcctatgtcgccatggtcttcaccgacaccgtgatgatgggcaagctcggccccgacgcgctggccgccggcggcctgggcgcggtcagctacgccttcgtctcgacgttctgtgtcggcgtggtggcagcggtcggcaacctggtggcgatccgtcacggctgcgacgacgccgctggcgccgccgcggccgctcgctccggactctgggtcggcgccgcgctggccctggccgccggcctgctgctatggaacctgcggccgctgctcctggtcttcggccaggcgccgcagacggtggacggcgccatgcagttcctccacagcctgacattcgccctgcccggctacatggccttcatggtcctgcgcggcttcaccagcgccatcgaccgcgccggcccggtgatggcgatcagcgtgctcggcgcgctggccaacctggctctcaactattccttcatagaaggcctgttcggcctgccgcgcctgggcctggccggtatcggcctggtcaccgccctcgtcatgaactgcatgccgctgctgctggccctgtatatccgcctgcagccggcctatgctgagtactcgctgctgcgcggactgggacggccgcagcgggcgatggtcgaggagatactgcgcctggggctgcccatcggtggcacctacgcggtggagtcggggatgttcacggtcgccaccctgtgcatgggcatcatcggcgatcacgccctggccgcgcaccagatcgccatccaggcggtatacgtggcgttcatggtgccggtggggttgtcgtacgccaccacctaccgcatcggccagcatttcggcgccggccgcctgctcgaagcacgccgcgccgggcgtgtcggcatcggcttcggcgcgctgtgcatgctgctcttcgccgggctcttctggtggatgccggaggccatcatcggcctgttcctcgaccgcgacgccccggccaaccgggaggtggccgcgatggccgtctcgctgctggcgatcgccgcctggttcgagctgttcgacggcacccagaacgtcgccatgggcgcgatccgcggtctcaaggacgcccgcaccaccttcctggtcggcctggcctgctactggctggtcggcgtgccgctggcctgcctgctggcgttcgcggccggctggggcgccgcgggcgtctggtgggggctggccggcggcctggcctgcgcggccattggcctgaccctggccttcgagtggaagaccgcgcggttgctgccgaaagccacggccagcgaggcgtcggcgctcaattgccgagcggctggccgcggtgcgccgagcgctcgccgatgcccaggaaacgcgccagttccgccaacggcagcggcggactgatccagtagccctgcacctggtcgcaaccgaaatcgcgcaactgctcctgctggcgcagggtctccacgccttcggcaaccacttccaggttgaggttgtgcgccaggttgatcatcgcccgcaccagttggaagttttccgcccgctggtccatgccgccgacgaagctgcggtcgatcttcaacagggtgatcggcaggctattgaggtggacgaaggacgagaaaccggtgccgaagtcgtccagcgaaaagcgcacgcccagttggccgagcgcctgcatggtctgcagcacctggtcgctgcgccgcatcacggcggtctcggtcagttcgaactcgagccagcgcgcgtcgacgccgtgctcttcgatcaaccgttgcagggtcggcagcaactggctgtcctggaactggcggaacgacaggttcaccgccatgtgcaacggctccagaccgcgcccgttgagccactgcatgtcgcgcagggcgcgggcgatgacccagtagccgagcggcacgatcagcccgctctcctcggccagcgggacgaactcgctgggcgtgagcaggccccgctcgccgtggcgccagcgcaccagcgcctccaggccgacgatgcgcccgctgtccaggcacagtcgcggctggtagtgcagctccagctcgtcgcgacgcagcgcccggcgcagttcggcttcgaggtcggcgaggctgcgcacgccacggttgatgcgttcgtcgaagacatggaaggtgcaaccctggcggctcttggcctgctgcatggcgatgtgcgcatgccacatcagcgggtcggcaccttcgtcggcacgtgcatgggcgagtcccaggctgcaacccagcaacaggctctcgccatcgatccagtagggctcgccgaggcattcgacgatgcgttcggcgacccgctcggcgcgttgcggatcgcgacgggtgtccagcagcagggcgaactcgtcgctgcccaggcgcgccaggctgtcgccgttctccatgaagccgcgcaggcggttgaccacctgcaggatcaggcggtcgccgccctggtggccgagggaatcgttgacgtgacggaagttgtccaggtcgaggtggccgagcaccaggccacgcccgtcgaattcgctgaggcgcgccgcgagcagggtctggaagccctggcggttggcgatgccggtcagcggatcctgctcggcgagcagttgcagggtcgcctgcaagcccaggcgctcgcgcgcatagcgcaggcagcggcgcaggctgtcctcggaaagctgttcggcggccagccagtcgaccaccccgaccggcgcctgcgccggctcctgctgcaacagcaggatcaccggccaggggcagggagtccccagcggcaggcaggccggcgtggccaggagcagcccgcggggctcggcggcgaacagggtggccgcgccctcccaggtggtgacgatgctcagcgaaaaggcaggccccaacgctctcaggcgttcacctagcagtggcgcccagtccggcgtatccgccagaaggagcaggcgcaagggttctgcgggcgctgacaagcaacctccaaagttttaagaatcttcgtaaagaacgaacggcatcatcctaatgcggtagggaatctacagcaaaatggcgtgaacgatctcgggatcggtcacagcttgcacgctaattctcgcggatgccagccagcctgttagaatacgcccccgcttcaaccctctcttccggcctgttcctatgtcccgactcaatccccggcagcaagaagccgtgaactacgtcggcggtcccctgctggtcctggctggcgccggctccggcaagaccagcgtgatcacccgcaagatcgcctatctcgtccagcagtgcggtatccgcgcccagtacatcgtcgccgtgaccttcaccaacaaggccgcgcgggagatgaaggagcgcgtcggcaccctgctgcgcggcggcgagggcaagggcctgaccgtctcgaccttccacaacctcggcctgaacatcatccgcaaggaacacgaacggctcggctacaagcccggtttctcgatcttcgacgagtcggacatcaaggcgctgctgaccgacatcatgcagaaggagtattccggggacgacggcgtcgacgagatcaagaactacatcggcgcctggaagaacgacctgatccttccggaggaggcgctggaaaaggcccgcaaccccaaggagcagaccgccgcgatcgtctacctgcattaccagcgcaccctgcgcgcctacaacgcggtggacttcgacgacctgatcctgcaaccggtgaagctgttccaggaacatccggacgtcctccagaagtggcagaacaaggtgcgctacatgctggtggacgagtaccaggacaccaacgccagccagtacctgctggtcaagctgctggtgaaggaccgcgcccagttcaccgtggtcggcgacgacgatcagtcgatctacgcctggcgcggcgcgcgtccggaaaacctgatgcagctgaaggaagacttcccttcgctgaaggtggtgatgctggagcagaactaccgctccaccagccgcatcctcaagtgcgcgaacgtcctcatcgccaacaacccgcacgtattcgagaagcagttgtggagcgagatgggccacggcgatccgatccgggtgatccgctgccgcaacgaggacgccgaggccgagcgcatcgccatggaaatcctcaccctgcacctgcgcaccgagcggccgtacagcgagttcgccatcctctaccgtggcaaccaccaggccaagctgatggagctgaagctccagcaccaccagattccctatcggctctctggcggcaccagcttcttcgggcgccaggaagtgaaggacctgatgtcctacttccgcctgctggtgaaccccgacgacgacaacgccttcctcagggtgatcaacgtgccgcgccgggaaatcggttcggcgaccctggagaagctcggcaactacgccacccagcgcaagatctcgatgtacgccgcctgcgacgagatgggcctggccgagcacctcgacagccgtttccacgaacgcctgcaacgcttcaagcgctggatggacggtatccgccgacagtgcgcggagaacgagccgatcgccgtgctgcgcagcatggtgatggacatcgactacgagaactggctgcggcagaacgcctccagcgacaaggtcgccgaattccgcatgagcaacgtctggttcctcatcgaggcactgaagaacaccctcgagcgcgacgaggaaggcgacatgaccatcgagcaggccatcgccaagctggtcctgcgcgacatgctggagcgccagcaggaagaagaggaaggcgccgaaggcgtgcagatgatgaccctgcacgcgtcgaaggggctggagttcccctacgtgttcatcatgggcatggaggaagagatcctgccccaccgttccagcatcgaggccgacacggtggaagaggagcgccgcctggcctacgtcggcatcacccgcgcgcggcagaacctggcgatgacattcgccgccaagcgcaagcaatacggcgagatcatcgactgctcgccgagccgcttcctcgacgaactgccccccgaagacctcgaatgggaaggcatggaagacgccccgcaagaggtcaaggcggccaagggcaacgccgccctcgccgacatccgcgccatgctcaagcgctgagcccgccgcgcctcgactgtctcgattttcacaaaagtgtcttgcccgatgcctagcctcgggcgaggaacttttgccgctccacgcgcgaccaaaattagctagctaacgaattccattcgaggacagcttcatgtcgagcaagaaagtcgccgagatcgtcgtggaaaccctggaagccgccggcgtccgccattgctatggcatcgtcggcgacaccctcaaccatgtcaccgacgccatccatcgcagccagatccagtgggtccacgtgcgccacgaagaagcggcggccttcgccgcgggcgccgagtcctacatcagcggacgcctgaccgcctgcgccggctcctgcggaccgggcagcctgcacttcatcaacggcgtctacgaggcccagcgcaaccgcgcgccgatggtcctgatcgccagccagatcgttaccccgcaactgggcatggagtttccccaggaggtcgacttcaaggcggtctacgccagctgctcggtgttctgcgagcaggtgcacagcccggaacaggcgcgccgggtggtggccctggcctgccaggcggcgctcaaccggcgcggcgtggcggtggtgatcctgccggccgacatcagccaggccacggtgaaggacgacctgccgttctcggtgcatttcccgcaaccggtgctgcgccccagcgacgccgaactgcaggacgtcgcccgcctgctggcccacggcaagaagatcggcatctacgccggctccggctgccagggcgcccacgacctgctggtggccctcgccgaccgcctcaaggcgcccatcgcgcacacgtcgcgggccaaggacttcgtcgagtacgacaaccccttcaacatgggcatgaccggtatgctcgggatcgagtccggcttccacatgatgaccgagtgcgacaccctcctgctgctcggcgccgacttcgcctgggcgcagttctatccgcagaaggccaccctgatccaggtcgaccgcgatggcagtcacctgggccgccgccaccccatcgatctcggcgtggtcggcgacgtgatccccaccctcgaggcgctcttgccgttgctcgaagcccgcgaggagcgcagcttcctcgacgaatgcctggagcaccgcgagcgctcgctgcggacgctggaaaaagaggagcaagccggcaagggcgagctgatccatccgcagcacctggtcagcctgctcgaccagcacgccagcgaggacgccctgttcaccgccgacggcggctcggcgatggtctggctgttgcgtcacatccacagcaacggcaagcgccgcaccctcaccagcctggtccacggcaccatggccaacgccatgccccaggcgctggggctgaagaaggcctaccccgagcgccaggtgatctcgatctccggcgacggcggcctggccatgctgctcggcgacctgctgacggccatccaggaaaaactgccgatcaaggtagtggtgctgaacaatgcctcgctgaacttcgtcgagctggaacagaaggtcgagggcctgctggacaactacaccgacctgctcaacccggacttcgcccgtctcgccgaagtgatcggcttccacggacgcaaggtgacgcgctccgaggagctcgaggcggcggtgcaggagttcctcgcccagcccggtccggcgctgctggacgtgcataccaaccctgcggagctggtgatgccgccgaagatcgagttcggccaggtcgccgacaccgcgctctacgccgccaaggccgtgctcagcgggcgcttcaaggacgtcgagacgctactggtgaacaacctgctgaaatgagccggcagcggcgcggcccgcctgccacggggccgcgccgggcaggcgcggattcctgaccgctcgatcatgttcgctcgtccgagagaacgtcgcgcgcggcgccggctggcggtacaatgccgcgcttcatcagcgacagccgcttcgcaggaagccacccgtggacattctcaaagacaaaatccgctcggaaggcatcgtcctttccgagcacgtactcaaggtcgacgcctttctcaaccaccagatcgacccgcagctgatgcagcaggtcggtcacgcgttcgccatgcgcttccgcgaccagggcatcaccaagatcgtcaccatcgaggcttccggcatcgccccggcggtcatggccggcctggagctgggcgtcccggtgatcttcgcccgcaagtaccagtcgctgaccctgaaggacaacctgtacatctccaaggtgttctccttcaccaagcagaccgagagcaccatcgccatctcggccaagcacctgaacgcccacgaccacgtgctggtgatcgacgacttcctcgccaacggccatgccgccaaggcgctgatcgacctgatcggccaggccggcgcgagcatcgccgggctcggcatcgtcatcgagaaatccttccaggatggccgcgccctgctggaaagcgaaggctaccgggtcgagtccctggcccgggtgaaatcgctggccggcggtcaggtcgagttcctcgactgagcgccactcagccccgctcttcctggctggctcgcaggccggccagcagcaagcgctggtagagttcctcgcgaagcccctgcggatcgtccaggtccatgcgccgcagatgcgccgggtaggcttctggctccggcgcatccagggtcgccttgcccagttcgaggatctcgctcagcttcagcttgcgcttgagccaacccagcgcccgcagcaggtcctgctcgacctcgtcgaaatcgctgcccaggggaaactccggcagcgccgctgcgtgggcctggtgcaaggcctgcaggcgctccggggtattgttgcgatagcgttcgggcaggacgaaatccttcggcagcttgccggccgactgggcctgctcggccagcgcctgctggaagcgcgagtcggcgatggccagcagcgcggcgatcacttccgcgtcattcttgccgcgcaggtcggcgatcccatactcggtcaccaccatgtcacgcaagtgccggggaatggtggtgtgggcgtactgccagacgatgttcgaactgacttccccgccggattcgcgccagctacgcagcatcaggatcgaacgtgcgccctccagctcgtgagcctgggcgacgaagttgtactgcccgccgacgccactgagcacccggccgtcctccaactggtcggcgaccccggcgccgagcagggtcacggtgaaggcgctgttgatgaagcgcgcgtcgcgccgctgcagacgcttcagctcttcctggcggtacaggttgttgacgaagccgatgccggtcatgccaatcccggcgcgctcttccagcgacatctcgcgcaggcgccggtagaacgccaacggaccgaggaaaaagccgccgtgcagccacaccccgccctccaccggcgcctcaccgcgctcggcggcacgctgccgcgcttcgtcggggtagacccggcggctcagcacgccggcctcggccagcgccagcagacccggcacgaacatctcgctgcaaccgtaaagcccccggcggaacggctccaggccaccgtcgcgctcgatcgtctcggcccagcgcgcacgcacacccagttcgtcgatcaacgcccggtaggtggcgttgtcgcgctggcgcagcagcagggcggcggtcagcgcgtcgcccatcgagccgatgccgatctgcagggtgccgccgtcgcgcaccagcgcgctggcgtggagaccgatacagtgatcctgcaggttgaccggcatgttcggcgtggagaacagccggctgctttccgccggcgcgtcgatcagcaggtcgaataccgactcctcgacctcggcgtcgcccggcaggtagggcaggtcatcgtggaccacgccgatggcgacgatggtctcgccagcggcgcgacgcttctccagcataggcaggaggtccagggtgatatccgggttgcaggccaggctcagcttgcccggccgctcgggatgccgcgccaccagctgggccaccgcgttgacgcccttggcattgatgtcgcgggcgacgtggctgtagttgcaactgatgtagtgctgctgcgccggcgcgctgtccagcaggctgccgggctgcaggtagaactcctcgacgcggatgttcgccggcagttcgtcgcggcgcagggcgtgcaggtaatccagctccgggtagtcagcgaagacccgttcggcgaaaggctcgaggaaacgccgttgcaggtcgccgccagcggcgggacgccccagggaaagcgcggtatacagcgtcagttggcgctccggcagggtccgcaggcgctggtacaacgcattgaccagtcggttgggcttgcccagcccgaggggcaggcccatgcgaatcgggccctcgatggtctgcagcaagtgatcgactgcggcgtcgatggaacaggttcggctcaagacgatgccctccggcgaatgggtagccggaagtttggaccctgtttgccggcgggacgatccgccagcgggaaaaacccgcaccgcggatacgaaaaagccgccaggaggcggcttttcgcgacacggttccggcgttgttacagaccggacatatgcttgatcgcggctttcagctcgtcgtccgagcaatcggcgcaggtgcctttcggcggcatggcgttgataccggaaatcgccttggccagcaggccatcgaggccgccctgctccttggcgcgcttgccccactcggccttgtcgccaaccttcggcgcgcccagcaggccggtgccgtggcaggtgttgcaggtcttgccgacgatgtcttcgccggaacgcgcaccgccgccaccggcggctgccgcgacggcgccgacgccttcgcattccttgccttgtacgcagaccttgcctaccggctcgaggcgcttggcgatcgcatcgtcagtggtcgtagcctgagcgcttacagcccacagggccaacacggcagcttgggccgccagcatttttttaatcaggttcacccttacaccctcatcgtggcttatcacacccgggcacgataccgatcactgcgggccgcgcgggcgggcgcaagtataacggcaaagaaagcccggcagaaacaattgcacaccctcgcaaagccttgcggcattaggtcgcagccccgcatgccccttgtcggccggcgcccttcgggcccggcggggtcttgtgcttcaggtcagaaatttgcgggcgtggtggcgctgatcaagcgtgccggcacatcgtagggattgcgaaaacggtgcggcttgttgctctcgaaatagtagctgtcgccgcgctcgagcacataggtctcgctgccgacggtcagttccaggcgcccgtcgaccagcacgccggcctcctcgccttcgtggttgagcatttcctcgccggtgtcggagcccggcgggtaggtttcgtcgaggaaggcgatcgcccggctcgggtgcgccttgcccaccaggcgcatggacaccgcgccgctggaaatgtcgatcagttcgtctgccttgtagacaacctgggtatggctgtcctgctccaggtccagggagaagaactccaccagggacatggggataccgcccagcaccttcttcagcgaactgatggaagggctcacgctgtttttctcgatcatcgagatagtgctgttggtgacacccgcccgtttggcgagttcgcgctgggaaagacctttgagctttcggatggtttgcagacgagcaccgacgtccaagggtggagtcctccttattcttctggcaggcaaggcaaaacgaggccgcacacggctggcgaccccaagtcggccgtatcatggcaacactgttcagtatttacaacagatcggtcgacatgcctgcgcaaagaattcggaaagtttttctcaagccccggaatagacgcgcggcacccttttcaggttgcacagcagctggtagggaatgctgccgaactgcgccgccagggcgccgaccggcacgttcgggccccatagttcgacccggctgcccagcccggcctggggatggtcggtaaggtcgacggtgagcatgtccatcgatacccggccaaccaggcgccccggcttgccgtcgatgaacacaagggtgccgtcggcggcgtggcgcggatagccatcggcgtagcccatggcgaccacgccgatgcgctggctacgctcggtgctgtagcgcgcgccgtagccgaccggttcgccggccggcaggtcgcggatgctgatcaccttcgattccagggtcatcaccgggcgcaagcggtcggccagcggatgtgcgcgctcgaacggcgtggctccgtagagcaggatgcccggacgtacccaatcgctgggcaccttcggccagccgagcacggctggcgaattgcgcaggctgatctcgccttccaggccctggctagcggccgcgaaggcggcgagctgttcctcggtgcgcgggcaatccagttcgtcggcgcgggagaagtgactcatcatcacgatcttcgccaccttgccgctggcccgcaggcgctcgtgggcggcgcggaagtcctcggggaagaagccgacgcggtgcatgcccgaatccatcttcagccagacgttcagcgggcgggccaggctggcgcgttcgatcgcctccaattgccaggcgcaatgcaccacgcaccagaagtcgtgggcgacgatcagctccagctcggacgcctcgaagaagccctccagcagcaggatcggctggcggataccggcctcgcgcagctccaggccctcctcgatgcaggccacggcgaagccatcggcctcggccgccagcgcttcggcacagcgcactgcgccgtggccgtatgcgtccgccttgatcaccgcgagcgcacgggcgccggtggcctcgcgggccagccgatagttgtgacgaagggcttgcaggtcgatcagggcacgggcggggcgcatggcgacgggtctctcttcagcgaggtgcggcatcgcgcacctttcatcaggcgaaaaaaagcccggctctccggccgggccagacaaaactcagggcagcgcagcgaccaccgacatctctaccaggatctccggctcgcagagcttggcttcgacggtggcgcgcgccggcgcgacgccgcgcggcagccactggtcccagacgcggttcatgccttcgaagtcggcgtcgatgtccttcaggtagatggtcaccgagaggatccgagtcttgtcggtgccggcctcttccagcagacgctcgatggccgccagggtctcgcgggtctgctgctcgacgcccgcggacatgtcctcgcccacctggcccgccaggtagacggtgccgttgtggacgacgatctggctcatacgctcgttagtgtgctggcgctggatgggcattcttggcgttctccggggaattgctgtagcgggaaatatccaggccttcggtactgatctgcgggcgcttcttcgccatcaggtcggccaggtagcgacccgacccgcaggccatggtccaacccagggtgccgtggccggtattgaggaacaggttgcggtagcgggtggcgccgacgatcggggtgccatccggggtcgccgggcgcaggccggtccagaaggtcgcctggctgatatcgccgccctcgggatagaggtcggtggtgatcatttccagggtctcgcggcggcgcgggttcagcgacaggtcgaagccggcgatttccgccatgccgccgacgcggatgcgctggtcgaagcgggtgatcgccaccttgtaggtctcgtcgaggatggtcgaggtcggcgccatctccgggttggtgatcggcacggtcagcgaataacccttcagcggatagaccggagccttgatacccagcggcttgagcagttgcggcgagtagctgcccagggccagcacgtagtggtcggcggtgagcaattcgccgttgaccagcacgccgttgatgcggtcgccggcgaagtccaggcgctcgatgttctggccgaagcggaactccacgcccaggcccttggccatttccgccaggcgggtggtgaacagctggcagtcgccggtctggtcgttgggcaggcgcaaagcgccgaccagcttgtcggcgaccttggccaaggccggctctacgcgggcgatgccatcgcggtcgagaacctcgtagggcacgccggagcgctcgagcacggcgatgtccttgccggcggcgtccagctgcgcctgggtgcggaacagttgggtggtgccgagggtgcggccctcgtaggcgatgccggtctcggcgcgcagttcgtcgaggcaatcgcggctgtactcggacaggcggaccatgcgctccttgttcacggcgtagcgctcggcggtgcagttgcgcagcatctgcagcatccaggcgtactggctgggatcggaggtgagcttgatggccagcggcgcgtgcttttccagcagccacttcatggccttcaggggaatgcccggggctgcccagggcgaagcgtagccgggagacacctggccggcgttggcgaagctggtttccagcgcgggaccgtcctgacggtcgaccaccaccacctcgaaccctgcacgggccaggtaatacgcactggcggtaccgatgacaccgctgccaaggaccagaactcgcattgtcgcctcccacgtcgcggaggaaccgcggacgtttgttattttgagcgtgtagatgcgcgcagtataggaagaggcaggcagaaataatcaccaattttaggcggttactcaggtaaaaaaccggacaattaggggttttaccgaggcgcatccaccataaaactggaaaaataccgcatatttaaatgatcgaactcaggccgggagtcgctttttcgggaaagcctgtcgcagaagccatggaaaacggcaggagtccctgaaggaaccgctcgcgacaggaaaaattccgcggacactgcccggcccttgcgaccggagcagcgtcccagagcgctcgcggagccttcgcgctatttcttcacccacttgccgccgacctggacgtactgcccggcaggggttctctccatcgccttcttgccggccatggcctccacgtcggccagcgaagcgccgctgctgttggccaccttctggtattcggcacgccgcgcggcattgatctgcgcggcgatgtccgccgcctggccgctgttgctgaccacgccaaggtagccgtccgcctgctcgccgaccaggccctgggccttggcgccgccaagggccgacatggcctggccgaggtccatcgccatggcggaaaggctgatgccgagggccagcagggcgataccgagtttgctacgggttgtcatggatccgctcctttagaacaggccgctgttctcgttgatgatgccgtccagagccttgtcgaccttgatgtagatctcgtgctcgattttcacgttgagattgatgttgatcggctcgctgggagccgccagctgcacggtgggcgtgcaggccatcgtcaggctgcccagcagcaggacagcgaatagagcgcagaggcgcatcgggggttctcctgtatggctcatggcgccgaagccttgcgtttctgcatgcgctcctgcacacgttggcgaatggtttcgctgacccggtcgctcagttgcaggctggtcagcagtgccgggatatcctcctccagattgacgttgaggttgaccgggcgccccttctccaggtccgggttgctgccctgcaagcgcaggccgagcaacagcttgccgttctcatgataatcgacgctgctttgcaggacgtcgtagtggaaatcgtcgagggcatcggcgaccagcttcatccccgggttgctgcgccccagcgcctcgatcttcgccgagcggaagcgcaggtagccgggctcgcgggccttgacctggccgccggagacgctgggcttccagcggttcagcatcagcggcagctcgccgtccagggcgccttcgccggccaggccctccgccggatagacccggaaaatctcgccgagttgtatgccctggatacgcaaggcgaacttctgctcagcctgacccaggcggatgctccccgcggggaccgaggcctgcccgccgaacaggccgctctgcaacgtctgccagctcaaacggccgctgcccggcgcggaaagcggggcctcatagcgcccgcggaaactcaccggccccagcggcaggccgggattggcctcggccaggctcaggccggggctgtccaggctcaactgaccgccacgcaggcgcaaggccaggctgccgcccagccccttcagctcgctgcggtcgtagataccgtcgaggcctttcagggtcaggtccaggtcgagggacgaggcgcccgccgcatcgagcttccagccggccgcggcggtcgctcgcccattgcccagttcgagcagccccggccagtcggcgagggtcgcggccagcggattgccggtacggaagaacacctcggccagcctggcggagagcgccaggggcgtcttcgcgtcgcgctgcagctggatgtccgccgccaaccccgcgccgttgctcagccgtcccttcaggctggtgcgctcgagggtggtgtcgagcggcccctcgaaggtccaggccaacggtttgaggttggcctggcggagttgtccgacctgcgcctgcagcggcccggcgaaatgcagcgccagcggctggtaggccagttcgagagcggccccggcgaggtcgaggcggggctggccaaggtgcagcgtcgacggctcggccagggacgccgcctgcaaccgcgcgcccctgccgaaggagaggttggcgcgctgcccgtccagccggccctccaggggaatctccgcgaccagtcgctcggctttccagcccaggtattgcaggcgcggcgcgtccacctgcaagcgaccctccaccagcctggcggcccacggcgagatgcccagcaggtcgagccgcgtctccagcttcagcgtactcgcgccctcgctggtgaacgccaggcgcaacgcggtgacgctatcggcatcgcgctccagcggctcgctgcgcaagcccagcgcgctcggccgcaactcggccggcagcgcctgcaaccactcgccgtgcaactggctcaggcgcaagtcgctgcgcagctggcgtggcaaccaggcgccctcgtctccatccagttggacttgcagttcgccctgtacattacccagaccgggcagcggccaggcttgcggagcctgcaccagcagcgccgccgagccaccgccgtcgagcacccggcgcggctccagccagtcgctgccaggcgccaggcggatcgtccagtccgcttgcagacgcagggcttgcggtgcgtcgggcaggcgctgggcttccggcaaccagcgattgagccagaccaccaggccacgggtgtccggcaggccgggcgcctccaggcgcccctgccagaggccgtcgccatcggacggcgcgagctggctgtccagcgtcagcagcgcctgccggtcgagttgcgcgcgcgcccgcaggcgccaaccggtaggctcctcgaagagctgggcgtcgagctgggcctgctgcgcctcttgttgcaggcgcagttgcgcagccagcggaaacagcgctcccgatgggcggccgatgtccagcccgccgtcctgctcgcagcggccggcgggacaaggcaggtcgagatggaagcgttcgaggtggatctgttccggcagccaggcgagggtctcgcgcagggacgtccagtccagcgcagcggagtcgtcgtcggaactcgcggcagccggttgccaggcgagggccacttgctccacgcgcaggccgggtagacgcggacgccaacccgacagcccgggccagcgcagcagcgcgtgttccacgtccagtcgcaagctggcgccatccgcgccgcgccgctccagcgccagccgtcgcagcccgatgccttcggcggacaggcccaggccttgccactccaggcgctcgacaccctgctcgcgcaacaggctgcgccaggcatgccagccgtagccgaacgccagcagcaacagcactgcaaataccagcagcaacgtcgtccttctgcgcaaacgcatgtcctacctctgtccgttgccgacccggccaagggtggcggggccctcgtgcaagatcaaggcgttttccctggccagtgtttttccctgctttcgacgttatattggcggaaaatttccggattttccgagccagacggggagcctccatccatgcgtacccagcatcagagcaagcgcgagctggacaagatcgaccgcaacatcctccgcatcctgcaggaggaaggtcgcatttccttcaccgagctgggcgaacgcgtcggcctctcgaccacaccctgcaccgaacgcgtgcgccgcctggagcgcgaaggcctgatcatgggctatcacgcccggctcaatccgcagcatctgaaggccagcctgctggtgttcgtcgagatcagcctggactacaagtccggcgataccttcgaagagtttcgccgggcggtgctcaagctgccccatgtgctggagtgccacctggtgtccggccacttcgactacctggtgaaggctcgcatctcggaaatggcgtcctaccgcaagctgctcggcgacatcctgctgaaactgccgcacgtccgcgagtcgaagagctatatcgtcatggaagaggtcaaggaatcgctcgacctaccggttccggattgacccaaggcactttccgggagtccgccaggactcccggcatagacgggaaacaccgtcttttctgtacacgatccccgcaacacctcgcagttttttcctttttcgcccttggcgagcgcctcgactgacgtttatgctccgtcaaattttccacacataataatcaggatttcacacatgaacgcccgcgttcaccagccggtgcataccgcccaacacgccccctcctactacgccgccacgctcaaccgacgcatcgagtgccctcccctggccggcgaagaacaggccgacgtgtgcgtcgtcggcggcggcttctcgggagtgaacacggcgttggaactggcccagcgcggcttctccgtggtcctgctggaagcgcaccggatcggctggggcgccagtggacgcaatggcggccagttgatccgcggcgtcggccatgacgtcgagcagttcctcccggtgatcggcgccgacggcgtgaaggcactcaagctgatgggcctggaggcggtggagatcgtccgtcgccgggtcgagcagtacgccatcgactgcgatctgcgctggggctactgcgacctggcgaacaagcccggcgactaccagggcttccgcgaggacatggaggaactccaggccctcggctatcgccacgagatgcgcctggtgccggccgcggagatgcgcagcgtggtcggctccgatcgctacgtcggcggcctggtggacatgggctctggccacctgcacccgctcaacctggtcctcggcgaagccgccgctgcccagtcgctgggcgtccgcctgttcgagcgctcgccggtgacgcggatcgactacggcacggaagtccaggtgcataccgccaccggcaaagtgcgggcgaagaccctggtgctgggctgcaacgcctacatgaacgacctcaacccgctgctcggcggcaaggtactgccggccggcagctacgtgatcgccaccgaaccgctggacgagaaactggcccgccaactgctgccgcagaacatggcggtgtgcgaccagcgcgtggccctcgactactaccggctctccgccgacaaccgcctgctgttcggtggcgcctgccattattccggccgcgaccccagcgacatcgccgcctacatgcggccgaagatgctggaggtattcccgcaactggcgaacgtccgcatcgactaccaatggggcggcatgatcggcatcggcgccaatcgcctgccacagatcggccgcctgccggggcagcccaacgtgtacttcgcccaggcctattccggacacggggtgaacgccacgcacctcgccgggcagttgctcgccgaagccatcggcggccagcagagcgacggcttcgacctgttcgccaaggtgccgcacatcaccttccccggcggcaagctgctgcgctcgccactgctggcgctgggcatggcctggtaccggctgaaggaaaaactcggtagctgagcccatccgaggctcggtggattctgaaaaaatcaggcggggcatcgctcttccgaggaaaactcctagaattcgcacgaccgggatgagccggtcgttcgagtttccacgggagatatccttgcttcgccgattcctcctgctggccctcctggccctctccggctgcgccagcactcctccgccgcaaccgtcgtcggcactgcccgccgagggtacctggctggccaggcaggccgaaatccagggacgcgaccaccccggccagtccggcttccacctcctgggcgccagcgaggatgccttcgtcgcccgcgcggcgctgattcgcgcagcccagcgcagcctcgacatccagtactacatcgtccacgacggactgaccacgcgcgccctcgcctacgagttgctcaaggcagccgaccgtggcgtgcgggtacgcatcctcatcgacgacaccgccagcgatggctgggactacgagatcggtgtgctctccgcccatccgaacatccaggtgcgcctgttcaacccgttgcacctgggccgcgccaccggcatcacgcgaggcgtcggccgcctgttcaacctgtcccagcaacaccggcgcatgcacaacaagctgtggctggccgacggcacggcggccatcgtcggcggacgcaacctcggcgacgagtatttcaacgccaagccggagatgaacttcaccgacctcgacctgctcggcgtcggccccatcgccaaccagctctcgcacagcttcgaccagtactggaacagcgccatcagccggccgatcgaggatttcctctggcgcgcgccctatcccggcgaactggagtcggcccgacgcaagttgcagcgctacctgcgcaaggagtcggtgaaggagtccggctacatccgccacctgttcgaccgcggcgaccagccacgcctgggcaactggctggagaatctcacctgggcccgcgccgaggcgatctgggatgcgccgctgaaggtattgagccgcggcgagcccgacccgcacctattgctcagtccgcacctggcgggcctgttcaagggcgtgcagaaggaactgatcctggtctcggcgtatttcgttccggccaaggacggtctcaactacctcaccggcaaggccgacagcggcgtccgcgtgcgcctgctgaccaactccctggaagccaccgacgtgcccgccgtgcatgccggctacgcgccctatcggatggcgctgcttgagcatggcgttaagctctacgagctgcgcgccaatcccgaccagccgctgagcggcgcgccctggcgcctgcacggatcgagcagcgccagcctgcacagcaaggcgatggtcttcgaccggcgcaaggtattcatcggttcgttcaacttcgatccgcgctcgatcctgtggaacaccgaagtcggggtcatcgtcgacagtccgctgctggccgagcaggtccgccaactggcgctggagggcatggcgccgagcgtcagctaccaggtgcgcatcgaccgcagcggtagccggccgaagctggtctggatcgacgaacgcgacggccggccccaggtcctgcgccacgagccgggcagcctgtggcgacgcctgaacgcctgggtcgcgggaatgatcggactggaaaagatgctctgagggtcactcggaggcttccaggcctgtcgcctcgtcgtccgccggaatcgccccgcgcagccgcaccagcaccacgaagcccgccgcgccgagcgccatcatcaacggcagggcgtgaccgctgatccactggctggcggcgccggtggccagcgggccgagcaggcagccgatgccccatagctgcgcgacatgggcattggcccggaccagggcatcgtctcggtagcgctcgccgatcaggatcagcgccagggtgaacaacccgccggcgctggccccgaacagcaccagcagcggccagatcaacggcgtctgcagcagcaggggaatcgccaggctgctcagcagcagcaccaggccgcagccgccgaacaggccgctgcgcgagacccggtcggcgagccagccgatcggcagctgcaacaatgcatcgcccaccaccacggtactgaccatggccagcgccaccgcttgcggaaagccctggcgcaacccgtataccggcagcagggtgaggatcatcgcctcgaaggcagcgaacaataccaccgcccaggcgatcgccggcagaccccggcagaaggcccacaaaccgcgcccggaggcactgtgcggatcgaccctgggcgcaccgctgcggcccagcagcagcaacgagccagcaatcagcaggcagacgccgaaccagaagccacggtcgtcggcggtaccgatgaaggtcagcagtaccggcccggacagttggctgagggcgtagccggtgccgtacagcgcgaccagccggccacgccacttctccaccgccaactggttgatccagctttccccgaggatgaacaccacggtgagctgcacgccgatcagcaggcgcagcaacagccataccgggtagctctgcagcagcgccagcaggccgacggaggctgccccggtgagcaggcacaactgcatcagccgcggcgtgccgacgcgcgcggcgaggcgcccggcgatcatcgcgccgagcagcacgcccactgccggcgtgctggccatcacgccgatggcgaaactgccgtagccccagctctccaggcgcaacgagaccagcggcatggtcaggccaagggcgaggccgatgctgatgactgcggaacagacggcgaaatagcttccccaacgcattgcgattctcccgttggcaccccggaagccttgccggggcgagcggatatatccggcgcacgaagcacagcggccgggcttccagaaggaaacccggccgcgggtgtggctcgagagagccggcccggaagggccgacctaggcgatcagagcttgatccaggtcgccttcagctcggtgtacttgtcgaaggcgtgcagcgacttgtcgcgaccgttgcccgactgcttgaagccgccgaacggagcggtcatgtcgccgccgtcgtactggttgacccagacgctgccggcgcgcagggccttggcagtcaggtgcgccttggacaggttgctggtccagaccgccgccgccagcccatagggcgtgtcgttggcgatgcgcacggcttcctcggcatcctcgaactcgatcaccgagagcaccgggccgaagatttcctcgcgggcgatcttcatcgcattggtcacgccgtcgaagatggtcggctcgacgtaggtgccaccagtttcttccagggtccgcttgccgccggcgaccagcttggcgccgtcgttgtgaccggcctcgatgtaggacagcacggtgttcatctgctgggtgtccaccagcgcgccgacgttggtttccggatccagcgggttgcccggtttccagcccttgagggcctcgatcaccaggggcaggaacttgtccttgatggagcgctccaccagcaggcgcgaaccggcggtgcagacttcgccctggttgaaggcgatggcgccggcagcggcttcggcggcggccttcaggtccggggcgtcggcgaagacgatgttcgggctcttgccgccggcctccagccagacgcgcttcatgttcgactcgccggcatagaccatcagttgcttggcgatcttggtcgaaccggtgaacaccagggtgtcgacatccatgtgcaatgccagcgccttgcctaccgtgtggccatagcccggcagcacgttgaacacgcctttcggaatgccggcctcgacggccagctgggcgatgcggatggcggtcagcggcgacttctcggagggcttgaggatcaccgagttgccggtggccagggccggaccgagtttccagcaggacatcagcagcgggaagttccacggcacgatggcggcgaccacgccgaccggctcgcgggtcaccaggcccagctcggcatggggagtggcggcgacttcgtcatagatcttgtcgatcgcctcggcgctccagcgcaggctgttggcggcgctggcgacgtcgatgtgcagcgagtcgctgatcggcttgcccatgtccagggtttccagcagggccagctcctcggcgttctccagcagcagatcggcgaagcggatcatcgtctgcttgcgcttggccggcgccaggcgcgaccaggcgccggaatcgaaggcattgcgggcgaccttgaccgcctgctcggcatcggccaggtcgcaactggcgaccttggccaggaagcggccatccaccgggctcaggcagtcgaaggtctcgccggaggcggcgttgctgtattcgccgttgacgaaggcacggccttcgatcttcaggtctttggcgcgggcttcccagtcggcgcgggtcagggtggtcatgacaacgtgtcctcttattggtgttctgggcgcctgggagacaggcgcgctgtcagattctgcaaggcgggcgcgcggcccgtggtgtccgccaccctaaaccagagcagcgcctgttttcaatatatttgacaggaacccctctaactcccttgtcacgttcattattttaaacatagactcgcccggactagcgtcttcatccctcgcgtgcaacctgggtggccctatgacaatgaataacgagccgcagtcgagcagcctcgacaacttctggatgcccttcaccgccaaccgccagttcaaggcgcggccgcgcctgctggaaagcgccgaaggcatccactatatcgcccagggcgggcgccgcatcctcgacggcaccgccggcctctggtgctgcaatgccggccacggccggcgcgagatcagcgaagcggtggcccggcagatcgccaccctcgactacgccccgccgttccagatgggtcacccgctgccgttcgaactcgccgcgcggctgacggaaatcgccccgccgggcctgaacaaagtattcttcaccaactccggctcggaatcggcggacaccgcgctgaagatcgcccttgcctaccagcgcgccatcggccagggcacccgcacccgcctgatcggccgcgaactgggctaccacggggtcggcttcggcggcctgtcggtaggcggtatggtcaacaaccgcaaggccttctccgccaacctgctgccgggggtcgaccacctgccgcacaccctggacgtcgcccgcaacgccttcaccgtcggcctgcccgagcatggcgtggaaaaggccgaggagctggaacgcctggtgaccctgcacggcgccgagaatatcgccgcggtgatcgtcgagccgatgtccggctcggccggcgtggtgctgccgcccaagggctaccttcagcggctgcgcgagataacccgcaagcatggcatcctgctgatcttcgacgaagtgatcaccggtttcggccgcgtcggcgaagccttcgccgcgcagcgctggggcgtcgtcccggacctgctgacctgcgccaaggggctgaccaacggcagcatcccgatgggcgccgtattcgtcgacgagaagatccatgctgccttcatgcaaggcccgcagggcgccatcgagttcttccacggctatacctattccggccatccggtagcctgcgccgccgccctggcgaccctggacatctaccgtcgcgacgacctgttccagcgggccgtcgaactggaaggctactggcaggacgcgctgttcagcctgcgcgacctgcccaacgtggtcgacatccgcgccgtaggcctggtcggcggcgtgcaactggcgccgcacgcggacggccccggcaagcgcggctacgacgtcttcgagcgctgcttctgggagcacgacctgatggtccgggtgaccggcgacatcatcgccatgtcgccgccgctgatcatcgacaagccccacatcgaccagatcgtcgagcgcctggcccaggccatccgcgccagcgtctgatccaggcgggcggctggcgccgccctgccccccaactggccagaaccacaagaaccgagagtcagcatgaacatcgaacagatcgtcgacttcgcccaggccaacagcgccccggagcactacagcccggcgccggagaaaatcctcaagggcgacccgaaacagagcgtgcgcaaccactacggcagcccctgcgggcagttcaacgccggtatctgggaaggcgccgtgggccagtggacggtgaactacaccgaacacgagtactgcgagatcatccagggcgtctcggtgctgcgcgaccggcacggcaacgccaagaccgtgcgcgccggcgaccgcttcgtgatccctgccggcttccagggcacctgggaagtgctcgaagcctgtcgcaaggtgtatgtgatcttcgaagccaaggcctgagccccggctgcatccagaatgcttgttacccttgcccgccacctggcgggcttttttgtgcgcggcccggggttcgtacgccggaaatgaaaaagcccgccaggggcgggcttttcgcaaggtgccggatcaattacttgatcttggcttccttgtagatcacgtgctgacgaacaaccggatcgtacttcttgatctcgatcttctcaggcttggtacgcttgttcttgtcggtggtgtagaagtggccggtaccggcgctggacaccagacgaatcaattcacgcatgattcagctccttagaatttttcgccgcgggcacgcaggtcagccaggacggcctcgatgccacgcttgtcgatgatacgcatgcccttggcggaaacgcgcagacgtacgaagcgcttctcggactcgacccagaaacggtggtgctgcaggttcggcaggaaacggcggcgggttttgttgtgtgcgtgggaaatgttattcccggtaaccggacccttaccggttacttgacagactctagacatgcctcagccctctataacctcatgcccaacccggcatgggttggctgctttaactcaagttcgatactcagtttcaccggggtcttacccgctgcatcccgacgaaggagagcgtggccccagaaaagagcgcagctttatatcagaaaggcgccccgcgccgcaagggtgaagaccatggcgcagccgcggcccgcctcactgcgggcttcgcaccgcggccgttcgtcgccttgcctcgttgtcgctgcccgccgcatggtctagggtagcgattcaaggtcgccaacggccttgcatgactgcgcccaaccgctgcggatgggcatgttaaccgttcgaatggagcccgtcatgcgcctcgccgctttctccctgttcctcgcccccctgctgctcgcccagcccgccgccgctgccgccttgagcgtgtgcaccgaagccagccccgagggcttcgacgtggtccagtacaactcgctgaccaccaccaacgcctcggccgatgtgctgatgaatcgcctggtcgagttcgacgccggcaaggggacggtggtgccctcgctggccgagcgctggtcggtgtccgacgacggcctgagctatcgcttcgacctgcgccagggtgtgcacttccacagcaccgcctacttcaagccgagccgtacgctcgacgccgacgacgtggtgttcagcttccagcgcatgctcgatccggccaatccctggcacaaggtggcgcagaacggcttcccgcacgcccagtcgatgcaactgccggagctgatcaagcgggtggagaaaagcggcgaccaccaggtgctgttcgttctcgaccaccccgacgcgaccttcctgccgatgctgagcatgggcttcgcctccatctattcggcggaatacgccgaccagttgatgaaggccggaaccccggaaaagctcaacgccgagccgatcggcagcggcccgttcgtgttcaagcgcttccagaaggacgcggtggtgcgctacgccgccaaccccgagtacttcgccggcaagccggcggtcgacgcgctgatcttcgccatcaccccggacgccaacgtgcgcctgcagaagttgcgccgcggcgaatgccagatcgccctgtcgccgaagccactggacgtggagagcgcgcgcaaggacgccagcctgaaggtcgagcagacgccggccttcatgaccgccttcgtcgccctcaatacccagcatccgccgctggacgatcccaaggtgcgccaggcgatcaacctggccttcgaccgcaccagctacctgcaggcggtattcgaaggcagcgccagtgccgccaccggcatctatccgccgaacacctggagctatgccagggatattcccgcctacccgcacgctcccgaacaggcgcgcaagctgctggccggcaagcagcttcccgagctgaacatctggacccgcccgtccggcagcctgctcaaccccaacccgagcctcggcgcccaactgctccaggccgacctggcggaggccgggatcaaggccaacatccgcgtcatcgaatggggcgagttgatccgtcgcgccaagaacggcgaacacgacctgctgttcatgggttgggcaggcgacaacggcgatccggacaacttcctcactccgcaattcagctgcgccagcgtcaagtcggggctcaacttcgcgcgctattgcgaccccggcctggacaagctgattgccgacggcaaggccgccagcagccaggaacaacgcaccggcctgtaccaccaggcgcagaaactgatccacgaacaggcgctctggctgcccctggcccacccgaccgccttcgcccttacccgccaggaggtgcagggctaccaggtcaatccgttcggtcgccaggatttctctcgggtcgccgtgaaacgctgaaggccacgcccgggagaacccagcgatggatctcgaccgtctctacctgccgcattggcagttcagcgaacaccaccagcggctgatcgacgcgccggccgcagcggtactcgacgcggtggaagacctgctgcgcttcgacgacccgctggtgcgcgccttcctcgtcctgcgcgaagcgccgggaaggctggccggcctgctgggccggcgcaacgacctggccggccgcccacgcttcggcctgcatgagttcacccgcctggagcgccgcgccgaccaggccatcgcctacggcctggtcggccgcttctggcgcgccgacttcgccctggaacgcatcgcggacggcgagcatttccgctgctacgaccagcccggagtggccaagctcgtgctgtgtttccgttgcacgcccagcgccagcggtaccctgctgcacacggaaacccgggtgttctgccccgatcgcgccagccgcctgcgcttcaccccctactggttggcgatccgcccggtcagcgggctgatccgccggcgcctgctggcgggcatcgagcggcgcctgggctgagcccttcgtcgaacgctcacagccaaccgtattcggccagcgacagcggctcgccgtcgccgatgatgaagtggtcgagcacccgcacgtcgatgagcgccaaggcttccttgaggcgcgcagtgagctggcggtcggcgagactcggacgggcgtcgccggaggggtggttatgggtcaggatcagcgccgccgcgttgtgcgccagggtgcgcttgaccacctggcgcgggtagacgctggcgccatcgatgctgccctggaacagcacctcgaacgccaggacccggtgcctcgtgtcgaggaacaggcaggcgaacacctcgtgctgctcgtggcgcaggcgcgccttgagatagtcgcgcaccgcctgcgggctctccagtatcgaatcgcgacgcaggcgctcggccaggtggcgccggcccatctccagcacggcctgcaattgcgcatacttggccacgccgagcccgagatggccgcagaacgaggcgaggtccgcctcgagcagggcacgcagcccgccgaactcgctcaacagccgccgcgacagctcgaccgcactacaaccggtcactcccgtgcgcaggaagatcgccaacagctcggcatcggaaagggccgccgcgccctgctccagaagcttctcccgaggccgttcggcttcgggccaatcgcggatgctcattcgctttccccatcgagcccgcccgctgttcccgtgcggacgctgtgctatcttagcccatcctttttgcgcggcagacgacctggggaggcgcgtttgccgaagcgcatgtcatccatttccttattaaggcaagcctatgcagcggctctatcggaaacgcatcgtcctcggcgtgggcggcggcattgccgcctacaagagcgccgaactggtccgccgcctgcgcgaccagggcgctgaagtccgagtggtgatgacccagggcggccgcgagttcatcacgcccctgaccctccaggcgttgtccggccatccggtgcataccgatctgctggacccggcggcggaagccgcgatgggccacatcgaactggcccgctgggccgatctggtgctgatcgcaccggctaccgccgacctcatggcgcgcctggtccagggcgtggccaacgacctgctgaccaccctggtgctggccaccgacgcgcaaatcgccctggcaccggcgatgaaccaggccatgtggcgcgacaccgcgacccaggccaacgccgagctgctgcgccagcgcggcttccacctgttcggtccggcagcgggcagccaggcctgcggcgacgtcggcctcggacgcatgctcgaagccgaggaactggcgcagcgcgccgccgactgcttccagcgccaggcgctgaccggcgtgcatgtgctgatcaccgccggcccgacccaggaaaacatcgacccggtgcgctacatcaccaaccacagttccggaaagatgggcttcgccctcgccgaggcggcggtggaagccggcgcacgggtgaccctggtcaccggcccggtgcacctgcccacgcccgaccgggtgcagcgcgtcgacgtggtcagcgcccgcgacatgctggccgcctgcgaggcggcgatgccctgcgacctgctgatcgcctccgcggcggtcgccgactaccgcccggaagtggtcgccgcgcacaaactgaagaaagaccctaccagcggcgagggcttgctcttgcagctggtgcgcaatcccgacattctcgccaccctcgcacagcgcgaggatcgtcccttcagcgtgggcttcgccgcagaaaccgaaaacctgctggactatgctgcacgcaagctgaaggacaagaacctcgacctgatcgtcgccaacgacgtggccaacccctcgatcggcttcaacagcgacgagaacgcgatcacggtgatcgaccgcgacctgcatccgagcaccttcgcccagaccagcaagggcaagatcgctcgccagctggtcgccttcatcgccgaccgcctcaaccagcaatgagttactgatgcactctctccaagccaagatcctcgacccccgcctgggctccgacttcccgctcccgcagtacgccacgccgggctcggccggcctggacctgcgcgccatgctcaaggaagacagcgtcctcggcccgggccagaccctgctgattcccaccggcctgtccatctacatcgccgatcccggcctcgccgccctggtcctgccgcgctccggcctggggcacaagcacggcatcgtgctgggcaacctggtcggcctgatcgactcggactaccagggcgagctgatggtgtcgtgctggaaccgcggcgagtcgccgttcaccatcgccgtcggcgagcgcatcgcgcagttggtactggtgccggtggtgcaggcgcatttcgagctggtcgaagcgttcgacgaaagccagcgcggcgccggcggcttcggccattccggcagccactgaccccgaacacaggacgagacgccgaggagacgcggcatgaagcttttccagcgcaccgccaaggatgggaacgagttgggcgacctgctcgaaccggaaaagaagccgcgcaaggcagcgtccgaacgcgctgacggcaaggacctgctgcccggcataggcgccagcctactgggcgtggcggccgccggcgccctgctctggttcggcgtcttcggcggcgccggtgaggcgcagcagcgccagttggacgcggcctgggccgaaggccaggccggcgccttgcgccaggccttgcagcaactcgccgccgacacccgcgccgccgcggccagccccctcgccctcgaagccctgcaaagcggcgacgccacccgcatcgaggccgcccagcgcagcctgctggcctgggacggcgtggtcgatgcccacctgaacgcgcccggccaggccgcccaggacaacgacagccccggcccggtcagcttcgccgccctggatatcctgcaccgggtggaaagtggccagaacgtcgccgccgaagcctacaaggtcggccagcgctggttgctgtacagcgccgcgccggtgcgcggcgccgaccagagcctgcaaggcacgctgctgctggcggtcgacctgcaacggctgctgcgcgccctgccgcccttgccgggcgatgccggccaggtacaactggtccagcagttctccggcgcaccggcccaggtgctgctgcaacgcggtacgccggcgccgggcaagggtgcgcaagcgctggacagcggcaatccgaactggaaactgaactacacgcccggcagcgtcgcttcgacccaggcctcgccgctgctgctggcactcgcggcgctgctggcgctgctcggcggcatcctcggcacctacctcacccgttcgtcgctgttgcgccgcctgcatcaggatgtcctgaccctcggtcagtatcttcaggaactcggcgggcaacgcactgccaaaccccctgtgcctagcctgccgggcttcgccccgctgatccaggcattggcccgccagccgcggcgcaagccggagccgaccagcgtgcccagccctgccaaggcagcgccggtggcgccggtggcggtggcgaaagcgcctcctcgcgaggagccggcattggcagatccgttgttccagaacaccgacattctggatatcgacattctcgatgaagaccaggacctcctgggattggagcaaacccccatcatgagcactgtaaaagcaccgacgctgcccgccagcatcttccgcgcctacgacatccgtggcgtggtaggcgataccctcaccgccgagaccgcctactggatcggtcgcgccatcggctcggaaagcctcgcccgcggcgaaccgtgcgtcgctgtcggccgcgatggccgcctgtccggtcccgagctggtcaagcagctgatccagggcctggtggactgcggttgccaggtcagcgacgtgggcatggtgcctaccccggtgctgtactacgcggccaacgtgctcgagggcaagtccggggtgatgctgaccggcagccacaatccgccggactacaacggcttcaagatcgtggtcgccggcgagaccctggccaacgagcagatccaggccctgcgcgagcgcatcgagaaaaacgacctggcatccggcgtcggcagcgtagagcaggtcgacatcctgccgcgctacttcaagcagatccgcgacgacatcgccatggccaagccgatgaaggtggtggtcgactgcggcaacggcgtggccggggtgatcgccccgcagttgatcgaggccctgggctgcagcgtgatcccgctgtactgcgaggtcgacggcaacttcccgaaccaccatccggacccgggcaagccggagaacctgaaggacctgatcgccaaggtcaaggccgagaacgccgacctgggcctggccttcgacggcgacggcgatcgcgtcggcgtggtcaccaataccggtaccatcatctatccggaccgtctgctgatgctgttcgccaaggacgtggtctcgcgcaacccgggggccgacatcatcttcgacgtcaagtgcacccgccgtctgatcgccctgatcagcggctacggcggccgtccggtgatgtggaagaccggccactcgctgatcaagaagaagatgaaggaaaccggcgccctgctggctggcgagatgagcggccacgtgttcttcaaggagcgctggttcggcttcgacgatggcatctacagcgccgcccgcctgctggaaatcctcagccaggatcagcgtgacagcgagcacgtgttctcggccttcccgagcgacatttccaccccggaaatcaacatcaccgtcaccgaggacagcaagttcgccatcatcgaggcgctgcaacgcgacgcccaatggggcgaaggcaacatcaccaccctcgacggcgtgcgggtcgactaccccaaaggctggggcctggtacgcgcctccaacaccactcccgtgctggtcctgcgcttcgaagcggacaccgaggaagagctggagcgcatcaagaccgtcttccgtaaccaactgaaggcagtggattcctcgctgcccgtgcccttctgacatgtcggagctccccatgaccctgagtcgcgatgacgccgcccaggttgccaaggtcctttccgaggccctgccctacatccgccgcttcgtcggcaagacgctggtgatcaagtacggcggcaacgccatggagagcgaggagctgaaggccggcttcgcccgcgacgtggtgctgatgaaagcggtcggcatcaacccggtggtggtgcatggcggcggcccgcagatcggcgacctgctcaagcgcctgtcgatcgagagccacttcatcgacggcatgcgcgtcaccgacgcggcgaccatggacgtggtggagatggtcctcggcggccaggtgaacaaggacatcgtcaacctgatcaaccgccacggcggcagcgccatcggcctgaccggcaaggacgccgagctgatccgcgcgaagaagctcaccgtgacccgccagaccccggagatgaccaagccggagatcatcgacatcggccacgtgggcgaagtcaccggggtcaacgtcgggctgctgaacatgctggtcaagggcgacttcattccggtgatcgcgccgatcggcgtgggcagcaacggcgagtcctacaacatcaatgccgacctggtggccggcaaggtggcggaagcgctgaaggccgagaaactgatgctgctgaccaacatcgccggcctgatggacaagcagggccaggtgctgaccgggctgtccaccgaacaggtcaacgagctgatcgccgacggcaccatctacggcggcatgctgccgaagatccgctgcgccctggaagcggtgcagggcggcgtgaccagcgcgcacatcatcgatggccgggtgccgaatgccgtgctgctggaaatcttcaccgacagcggcgtcggcaccctgatcagcaaccgcaagcgtcactgatcgcccgccacggcgcgctccggcgcgccatggcggttcctccattagcgtcgcgcggccagcgtgaagacctggtccaacgggctcgtgccctcgctacggaaggtcgccgggctcactcccgtccagcgcttgaacgcgcgcctgaaactgcggatatcacgatatcccacttcctcggtgatacgttcgatggacatcccggggttgcccagcaggctcatcgcccgccctcgccgcacctgctccagcaacgcctcgaaggtcagcccgtgttcggccagccggcgccgcagggtgcggctgctcatgttcagttcggcggaaatcctttcgatctggctgcccaggcttaggtcgcgggcgatggcccgttccaccgcctggaccaggtcgagtttccggtgcacctgggtgctttcctgctccagcagggccagcgcctggcgcaacgccggcaggttgtggttgggcaggcgcatgtccagccagtggctggcgatcgccatgcggttgtgcaggcagccgaagcgtacctggggccccagcaggcgcaggtattcgcccgcgtagggcggagcggcatggatgagttcgatgcccagcggttcgaacgccgggctgaccagggcacgcccatacaccagcaggctggcgaagaactcctcgatggcgaacacctgcacctcgctgctgggcaggtggcattcgacctcgacgaagaaggtgtcgccctgctggtagacgctggaggtgacgataccgcccgagctgtgctggtagcgcacgccgatgtcgaacgcgtcgcgcagggtccggcacagcgacagcacatggcccagcaggccaagggtgccgagcacgttctggtgtccgacccacagccccagtccccgctccggcagggcctggagggcacgctggatcatgctcacggcctggcggtaggagatgcgctgggtagggtcctgcaggtcttcgacggtgaagcccaggccccggcacagccgcgcgggatcgacaccatggccttcgaccacctcggccagcgtctgcagcaggaaggtggatacctgggcgagttcgtagcgcgcatcggcggcattgttgtgcatgggcgaaatcctgagccggtctcggcttcgttcttgttctggcggtggatcgcgacatgggatgagcgtcccatcatatagcgttccgcacagatgtaacaaagcattgcgcagtgtccgcaaatccccccctcgctgaccgtcaatgccctgcctcggcctgccgttagggcttattcctatgccgtgccccgagccacgccaacaataataagagcccgcccatgaacccgatccgcccccacaggcccctgcgcctggccgcctgcgtcaccctcgccgtcagctgctgcacccacgccagcgaaggcggcgtggacaacattggtccaggaaccgacggtttcttcaccctgccactggacgtcgacaacctccccgaccacatgttcgccttcaacgtctactacaaccactacgaagccaggaagctgaacatcagctccttcggcggcaaggtgtccgacgtgaagatcagctcggatgcgatcatccctcgcctggactacctgagcccgctgcggatcttcggcgggcgcctgggcggctacatcgcccagccctatctccgccaacgggtggccgcgttcggcctgagcgacgaacgggaaagcatgggcgacaccaccttcgcgccgatcatcctctgggacatgggcaaggacctgaccctggccgccgccgtggaggtcaccgtgcccaccggcaagtacgatgccgagcggctggccaacaccagcaacaacttctacacctacaagccgctgttctccttcacctggctgcccaccgaacgcaccgagctgtcgctgaaggccacctacagcttcaacatggaaaaccacgacaccgactatcgctcggggcagatcttccatttcgactattccgccagctaccgggtgaccgacaacctgcgcctcggcctgaacggctactacctcaagcagaccaccgacgacaaacagaacggcgagaccgtacgggtgttcggtttcggcgaggaagtcgacgacggcgtacgcggccaggtcttcgccatcggccccgccgtgcacctgaccttccttaagtacgccagcgcggagatccgctgggccaaggaattcgacgtggagaaccgccccgagggcgacatgctctgggccaagctgaccattccgttcgaactctgaggcatcggaacgaagcggcagcccggtatccgcgggctgccgccatcgacgaggaaaagcgccaggcgtcctaggcgtaaaccggccagcgctcgacgatccgcccgccgcgcagcgccagcaggtcgccgaattgcagcagcaccgactcgctctgggtcggccgcaggaagacctggtcgtccacctccaggcccaccgaaggcgagccgttgaccatttcctggttcgagctgcgcccgtagatgccgttgctgcgcagtccctcgggcgaggcgaagtcggccatccagttgccgccgtagatgaagaaggtgccgcgctggttggggtcccaccaggaaaacagccgggacttgccgtccagcgccgggatctgcaccgcgccggtgctcttgagtaccggcgtggcgatgtagacggccggcacatgctcggccagggacgccaggtcgtagtggctcggcttgagcatggcggtgcccaccgagacctcgctgctcagcgtttccttctcgtgcatgcgatagctggggctgccggcggtattcagggtcagctgtggtgtccacagcgcggcgaagcgctggcgggcgaagtcgacatgtccctggtagagcgccatgaccttggcgaacagctcctcgggcgaaccgaggatgcccggcacccccattccgacgaaggggtcgtagcccatgaagccagcgaactccaggtactgcggatgcgccgcgatcagcgccagcaattcgcccagcgcggcctggtcggccaccccgccgcgatgcaggccgacgtccagttcgatgttgacgcgcatccgggtacccagcccctgggccagcgccaggtactgacgcaagcgctgcggcgtatcgatcagccattgcagctgccgcgccgggtcgaacgcacccttgtgctcgcggtagaacagttccgccgaacgcaccggcaacggcttgccgaggaggatgtcggcatccgcaaaagcgaccgcgtcgtggttgaggaacggttggtggaaggacatcagccgccgggtgccggcgcgcctggcgatgtacgccagcaggccgggcgaaggcagcgatttctccaccagccgcagatgcttgccgccgcggcggaccgaacgcatcaccacatcgatgttgtggtccaggcgatcgaggtcgatgagcagcaccgggcacatcgggccattggccttgagttcgcggttcagcgcgcggaaatagtcgtcgtacggcccgccacggtcggcgggacgcatccaggcggcagttcccgccagcagcgcgccggccccgaggccggcgaacatgaacttgcgtcgattcacggcgtcgctcctttcaggtcacgcccaggatggaagagaggtgcgcattgaggaaccgcccgcggggatccagcgcctggcgcacctcggcgaatgccttccagcgcggatagagcccctgcaactggtgcgcgttgaggccatgcagcttgccccagtgcggccgcccggcgtatttccagaagatcggttccaccgcggcgaagaagttgtggtggtccatgctgtagtgctgatgcacggaaatggaacaactgtcgcggccctcgaacatgctcaggggaatgtcgtcggccttcacgtagcggtactcgatgggaaaccaggtgcgcaggtccttgtcgcggatcagcgcgaggatctcccgcaggcaggcggggccatgctcggcggggaccgaatactccatctcgttgaagcgcacgttgcgcacgttggcgtagaccgcataggaatcgtcgacccgctcgtcgaagcgggcgaagtggcgcaggctgttgagcagggtgcggcgggtctccgggaagtcgctgaggtacttgtcgagaccttcgatcaggccgacgaactcgttgccgccttccttcgccgggtccaggggcggggtcttcggctcgtcggtctcgttgagggcgatcgacagggcgtagtcggaatgggtcaccaccagcatctcccagtgctggttctcgcgcgtattcttctccacgtcttccagcaattcttcggtccgggcgatccactgccgttcacgcaggcggtaggccgcgcggttctgcaggcgcacccgggtcacgacgcccagcgcccccagcgagacccgcgcggcatcgaacacctccacgttgcgcttggcgtcgcactcgagcacctcgccgctcgcggtgaccagttgcagaccgcgaacctgggcggaataggaaccgaagccgaccccggtgccatgggtggaagtagcgatggcgccggccagggtctggtaatcgatatcggccatgttcaccagcgcctggccgatctccttgagcggagcgcccatctgcgacatcggcgtaccgccgccgaactcggcctggagggtcgcgctgtcgtggctgagcaagccgctgaagtaggcgagcgagagcagggtgccgtcggtcgggaccaacgcgctgaacgaatgcccggagcccaccgggcggatcctgccggacgcctggcggatgatccggaccagttcgtcgaggtctttcggtgcctcccgcgccaggggcaggcagctttgcgcgccggaccagttgcgccagggaatcaggcgcggtgcacggagcaactccgccagcgcggggtttcccaccatggcggcgaacgcaccgagcgctcccgcccgttgcaggagctggcgtcgcgacagatgacttggcatgccggtatcccctatcggtcctgcgctgcggacatgaaatcgatcaaagcccggaactgttcttccgagcactgcatgcacatgcccatgggtggcatgcccttgtagccgttgatgctgtggtccagcagggtgtcgatgccctgcgccaggcgtggcgcccaggcagcggcatcgccggtcagcggcgcgccggaggcgggattggcgtgacagagcttgcaactggcggaatacacctgcgccaacgcagggtccgcagggacacgctgggaatcggcggcccgcgccggcggctccgtggattctccgcaggccaccagcatcaggcccagggcaagcagcaaccccgggcggcaaaggcgcgagttgcccggtccggggcggagcgtggacgacatggtgttcctctctcgttgcgcacggcgtgcgttctcgtcgaacaacactaaggccgcgacgccccgaggatgagggcaatgcgggccagcgacggggggttctgcggccagccctttcgcaccgcgcgatggcggtctagagtcgatgtctgcagcagcgtcgaggagccggcatgagcagcgcagcacagcgccagaactacaccttcttccattccctgcgggttcgctgggcggaggtcgatccgcagggcatcgtcttcaacggcaactatctgacctatctcgacgtcgccaccaccgagtactaccgccagctcggcatgtcctacccggccgacctgctgcgcggcggaggcgatctgttcgcggtgaagagcaccctggaataccgcgccccggcgcatttcgacgactggctggacatcggcacccgcgtggcgcggctggggcgcagcagcctggttttcgagctgggcatctggcgcgacgagcagttgctcaccgtcggcgagctggtctacgtctatgcggatgcgaacgagcgacagagccagcccctgccggactggctgcgcgagaagatcagggcgttcgagcgacagtcgccagtggaatcagggactcacgccgagtagctgggagagccgcgcgcggtcggcggcataggttctttccgcgtcttcgcgggccttctggaaacgcccgatctcgccctgcaggcgcttttcctcctgcttgagatcgtccaactggtccaccagcgcctgcgccaccggacgtccggcacgctcctggttggccgcctggccttgcaggttggcctgttgcagcttgagcgactgcaggttgccgcgcgccacgctgctcagcccgtccagttccgccaggcgccgttcgcgagcgcggtcgacgtcctcgaggctggaatacaggcgcagcagctgcgcatcggagctggcctgggcttgggccgccttgcgctgccgcagttcctcggcggtcggcgccggcggtacggtgcggataacccggccctggtcgttgaggacctggtagcccttgccgatgtactgcggcggcacaccctggcggtcgagcaccaccacgcccttgtcgttgacgtagcggtacagctccaccgctccgcccggcgccgcctgggcgccgaaggaaagcccctggagcaccagccccagggccatcaggcaacgcattacatcctgtccgaccatgccagtcccttgtgaaaggttcagataccgtattgggcgcgataggcctctaccgccggcagatgcttcttcagttcagcatcttcggcaagatattccagcacctgctccagggaaacgatgctcaccaccggcatgccgaagtcgcgctcgacctcctggatcgccgacagctcgcccttgccgcgctcctggcggttcagcgcgatcagcacgcccgcggccctggcgccctgggcgtcgatgatctgcatcacttcgcggatcgcggtgccggcggtgatcacgtcgtcgatgatcagcacccggccgctcagcggcgcgccgaccagcgtgccgccttcgccgtggtccttggcttccttgcggttgaagcaccagggcaggtcgcgttggtgctgctcggcgagggccaccgcggtggtggcggccaggggaatgcccttgtaggccgggccgaacaggacgtcgaagtcgattccgctgtcgatcaccgcctcggcgtagaagcgtcccaggcgggccagcgccaggccgctgtcgaacaggccggcattgaagaaataggggctggtgcgcccggacttgagggtgaactcaccgaagcgcagaaccccgcgctcgatggcgaaacgaatgaaatcgcgctgatacgcctgcatgaatgacaccaagccgcatgaatttagctaaaccgtttgagctcgggtatcatacacgcacgtgattttgggggccatttatgcggatcatcagtgtgaacgtgaatggtattcaggctgcggccgagcgcggtttgctcagttggctgcaagcacagaatgccgacgtgatctgcttgcaggacacccgagcctccgccttcgatctggatgacccgtccttccaactggacggctacttcctttatgcctgcgatgccgagctacccgaacagggcggtgtcgcactctacagccgtttgcagcccaaagctgtgatcagcggcttaggtttcgaaacggccgatcgttacgggcgctacctgcaagccgacttcgacaaggtgagtatcgccaccctgctgctgccttccgggcagagcggagacgagagcttgaaccagaaattcaagttcatggacgacttcacccattacttgagcaagcagcgtcgcaagcgccgcgaatacatctactgcggctcgctgtacgtcgcccatcagaagatggatgtgaagaactggcgcgaatgtcagcagatgccgggcttcctcgcgcccgaacgggcctggctggacgaagtgttcggcaacctcggctatgccgacgccctgcgcgaagtcagccgcgaaggcgaccagttcagttggtggccggacagcgaacaggccgagatgctcaacctcggctggcgcttcgactaccaggtgctgacccccggcctgcgccgcttcgtgcgcaacgccaagctgccgcgccagccgcgcttctcccagcatgcgccgctgatcgtcgactacgactggcagttgagcatctgagccctgtcagacacgaaaaagccggcgcatgcgccggcttttctatttcccgtgcggcctacttgatcagccgcaggcagaacggatagcgataggccttgccttcgttggccttgatgccggcgatgatggtcaacaccagcgccgccaggcagaccaggccgagcaggaagaagccgatcaccaccagcatcagcaggaagctgacgaacatcgccagcgccacggtgatctggaagttcagcgcttccttgccctgggcgtcgacgaacggatcgctctcgcgcttgagttgccagacgatcagcggcccgagcaggctgccgaagggaaacaccaggccgatgaacgccgcgaaatggcagaacatcgcccattgccgggcttcctggccgggggtcgcggcgacctcttcggatacatcgttcatgtagcgctccttctccggggcccggcaggcagtgccgggcgtctgctcattcggccagcgcggcgcgctgaagttcgaacagctcctgcatgccctgctgggccagttcgagcatggcgttcagctcggcgggacggaacggcgcgccttcggcggttccctgcacctcgatgaagccgccggcatcggtcatcactacgttcaggtcggtttccgcggcggaatcctccaggtagtccaggtcgaggaccggcacgccctggtagatgcccacggaaacggcggcgaccatttgcttcagcggattgcccttgagcgcgccacgcttcttcagcaccgccagggcgtcgatcagcgccacggtggcgccggtgattgaggcggtgcgggtgccgccgtcggcctggatcacgtcgcagtcgatgtacagggtgttctcgccgagcttgctgaggtccagcgccgctcgcagggagcggccgatcaggcgctggatctccagggtacgaccgccctgcttgccgcggctggcctcgcgctggttacgctcgccggtggagcgcggcagcatgccgtactcggcggtcaaccaaccctggccctggcccttgaggaagcgcggcaccccggactcggcgctgacggtgcagatcaccttggtatcgccgaactcgaccagcaccgaaccttctgcgtgcttggtgtaatggcgggtgatgcggatcgggcgcagctggtcggcggcacggccactgggacgattcatcgtggatatcctgtactgagaaagcggaattggccgccattatagaggccagcctgggctctcaaccaccgtcggcgtgcgggccccgccggacgtgggttacaatgcccggctcgaatcacggcagccgcgcgcgtccggcgccgaacgcactccccacacgactatcgaggtagacccatggtgcacagcatgaccgccttcgcccgcgtcgagcaggccggtacccacggcaccctgagctgggagctgcgctcggtcaaccaccgttacttggagccccacctgcgcctgcccgacgccttccgcgacctcgaaggcgcggtgcgcgaggcgctgcgccagggcctgtcgcgtggcaaggtggaatgcaccctgcgcttcgccgaggaaaccgccggcaagagcctgcaggtcgaccaggagcgcgcccgccaactggtcgccgccgccgaaggcgtagccgccctgatccgccagccggcgccgctcgatccgctcgccgtgctggcctggcccggcgtactggtggccgactcggccgatccgcaggcgctcaacgccgccgccctggaagccttcggccaggccctggagcaactcaaggccggccgctcgcgcgaaggccaggagctggcgaagctgctcaacgatcggctcgacgcgatgctggtggaagtcggcaacctgcgcgaactggtgccgaccatgctggccaaccagcggcagaagatcctcgaccgcttcgccgaactcaaggccgaactcgatccgcagcgcctggagcaggaactggtcctgctggcgcagaagagcgatgtcgccgaggagctggaccgcctcgccacccacgtcggcgaggtccgccgggtcctcaaggccggcggcgccgccggtcggcgcctggacttcctgatgcaggaactcaaccgggaagccaacactctaggctccaaggcgttcgacccgcgctcgacccaggcggcggtcaacctcaaggtcctgatcgagcagatgcgcgagcaggtccagaacatcgaatgaccggcgggcgcctccgcccgatctctttccaacccgtacgaagcaccaggaacacctcatgtccggcaccctgtacatcgtttccgctccctccggcgccggcaagaccagcctggtgaaggccctgctcgacgccgcccccgaggtccgcgtgtccgtctcccataccacccgcggcatgcgtccgggcgaggtggacggggtcaactaccacttcaccagccgcgaggaattcctcgccatgctcgaacgcaacgagttcctcgagcacgccgaagtcttcggcaacctctacggcacctcgcagcgctgggtcgagaaaaccctcgccgaaggcctcgacctgatcctcgagatcgactggcagggcgcccagcaggtgcgccggctgatgcccgaggcccaatcgatcttcatcctcccgccgagccaggaagccctgcgccagcgcctgaccaaccgcggccaggacagcgacgaggtgatcgagcggcgcatgcgcgaagccgtcagcgaaatgagccactacgtggagtacgatcacctggtgatcaacgacgatttcgcccacgccctggacgacctcaaggcgatcttccgcgcccgccagttgcgccaggacgcccagcagcaacgccacgccgaactgctcggtcgtctgctcgcctaaatcggctcttccataaagattggcgattttttagactattcagtccgcccggcaaacgtcgggctcacttttcgttacgaggaacaccatggcccgcgtcaccgttgaagactgcctggacaacgtcgataaccgtttcgagctggtcatgctcgccaccaagcgcgcccgtcagctggctaccggcggcaaggagccgaaagtggcctgggaaaacgacaagccgaccgtcgtcgccctgcgcgagatcgcttccggcctggtcgatgagaacgtcgtccagcaggaagacatcgtcgaggacgaaccgctgttcgcagcgttcgacgacgaggccaacaccgaggccctgtaagccatggcctcggctcgacgtcgcctgcgagcgccgcaacccgcctacgggcagggggtgaacccttgccgggcatagacgccttcgccgacagactgtcgagctacctcgggccggaccaggtcaacctggtccgccgcgcctactactacgccgagcaggcccacgacgggcaacgccgccgcagcggcgaaccgtacgtgacccacccgctggcggtctccaacatcctcgccgacatgcacatggaccatcagagcctgatggccgcgatgctgcacgacgtgatcgaggacaccggcatcgccaaggaagcgctcaccgcgcagttcggcgagacggtttcggaactggtcgacggggtcagcaagctgacccagatgaacttcgagaccaaggccgaggcccaggccgagaacttccagaagatggccatggccatggcccgcgacatccgcgtgatcctggtcaagctggccgaccgcctgcacaacatgcgcaccctcgaggtgctgtccggcgaaaagcgccggcgcatcgccaaggaaaccctggaaatctacgcgcccatcgccaaccgcctgggcatgcacaccatgcgcgtggagttcgaggacctaggtttcaaggccatgcacccgatgcgcgccgagcgcatccgccaggcggtgaagaaggcccgcggcaaccgccgcgagatcgtcggcaagatccaggagtcgctggtcaactgcctcgcccgcgaaggcatggaaggccaggtgatcggccgcgagaagcacctctacagcatctaccagaagatgcgcggcaagcgtaaggcgttcaacgagatcatggacgtctacgccttccgcatcatcgtcgacaaggtcgatacctgctatcgcgtgctgggcgccgtgcacagcctgtacaagccgttccccggacgcttcaaggactacatcgcgattcccaaggccaacggctaccagtcgctgcataccaccctgttcggcatgcacggggtgcccatcgagatccagatccgtacccgcgagatggaagagatggccaaccacgggatcgccgcgcactggctgtacaagtccaacgacgagacgcccaagggcacccatgcccgcgcccggcaatgggtgaagggcgtgctggaactgcagcagcgcgccggcaactcgctggaattcatcgagaacgtgaagatcgacctgttcccggacgaggtctacgtgttcacgcccaagggccgcatcatggaactgcccaagggttccaccgcggtcgacttcgcctacgcggtgcacaccgacgtcggcaacagttgcatcgcctgccgcatcaaccgtcgcctggcgccgctctccgagccgttgcagagcggccagacggtggaaatcgtcaccgccccgggcgcccggccgaacccggcctggctgagcttcgtggtcaccggcaaggcgcgcccccatatccgccatgcgctcaagctgcaacgccgctccgagtcgatcaacctcggcgagcgcctgctgaacaagacccttaccggcttcgacagccacctcgagaagattccccaggaacgcatccaggccgtgctcgccgagtaccgcatggaagtcttcgaggacctgctggaagagatcggcctgggcaaccgcatggcctacgtggtcgcccgccgcctactgtccagcgagggcgaggaagcgccaagcgccgagggtccgctggcgatccgcggcaccgaaggcctggtcctgagctacgccaagtgctgcacgccgattcccggcgacccgatcgttggccacctgtccgccggcaagggcatggtggtgcacctggaaagctgcaagaacatcagcgaagtacgccacaacccggaaaaatgcatccagctcagctgggccaaggatgtcaccggcgaattcaatgtcgaactgcgcgtcgagctggagcaccagcgtggcctgatcgccctgctcgccaccagcgtcaacgcggccgacggcaacatcgagaagatcagcatggacgagcgcgacggccgcatcagcgtggtccagctggtcgtcagcgtgcacgatcgcgtccacctggcccgcgtcatcaagaagctgcgcgccctcaagggagtgatccggatcacccgcctgcgtagctgacccgctttttcctgtgtcatccggcgcccccgcgcccactcgatttcagcaaggagttcccatgaccaagaccgttatccacaccgacaacgccccggccgccatcggcacctactcccaggccatcaaggccggcaataccgtctacgtgtccgggcagatcccgctggacccgaagaccatggaactggtggaaggcttcgaggagcagaccgtccaggtgttcgagaacctcaaggcggtgatcgaggcttccggcggctacctgcacgacgtcgccaagctgaacatcttcctcaccgacctgtcgcacttcgccaaggtcaacgagatcatgggccgctacttcacccagccctacccggcgcgcgccgctatcggcgtagccgccctgccgaagggcgcacaggtggaaatggacgccatcgtcgtcctcgagtaagccggatgttcgcgacggggcccaaggccccgtcgctctgcatggagtagcacgatgcgccgcgtgattttcctcgccgcagccgccaccctgctggccggctgcgccggcacggccgatccgtccggcacctggatcaaccaggccgcgatcgacgccgcgagcaaggacggcaagctgcgcgaggccctgctcgcctatggcccgaacctggaatggaagctcgacagcaaggcaggcgaagccaccttcagcaacggcttcgaactgggcgaagggaccctgagcaagagcgatgacgagcactggaaggttgccttctatggcgacgacaaccaggagagtctcgaactggacggcaaggagctgatccagcaggccaacgccaacggcccggaacagcgtttccgccgtctcgacccgcaacccgcggccaacagccctgccggcagcggtttcgagcgggccttgtatggcagctatctgaagggcagctggaagatccgcgaaggccagggccagggcggcaaggtcgagttccaggccaatggcctggtcagcggtctgcccggcgccgaacgctacgcgctgtgcctggccggcgattgcgcagcgatgagcggcgacaacgacagcatctggctgcaacaaggcaaccgcggccgcgaattgctgttcagcctcgacgacgacgagctgcaactgttcgaagcggtcaataccgccggcgccaacgagatgcccagctacgtgcccggcaagcgcgtctggctgctggagcgctgaggcctctcagagggcggccagcaccagccagccgcccagcgccagcagcaggacgccgcacagccggtccagcgcacctaccctccgttgcaaccagccgcgccagcgcggcctgtccagcaggcgcaccagcgccatgtcccagcacagcaccgccaagctcatccacgccaggcacaaggccagcgcccagcccggcaggctgaagcgcgccagcacgccgaacagccccgcatagaagatcggcagcttgggattcaggctgctcgccagcaggccgtcgcgcagcccgcgcagatagccgccgcgggacgggacgtcgcgctgcgccggcatttccagtcgcctctgcgcaagcagcgcctggcccgccagccagaggaagtacagtccgccgagcgcctgcagccagcgcaaggcgctgtgcgccgagtccggcacgctggccaacaggccgagcaccagcagcatgctcaggaggttggccagggcgatgccggcggccaccccgtcggcctggcgccggccgcgcagcacggcggcgcgcaccaacaggaagaagtccggccccggcgacagcagggcggcgaaatgggtactggcgacaaggacgaacgcggcgaacatgaaggcccctcgaaacgcgaaggcctccagtctgtgcagcacggcgggcgccgtattggaaaaaactcaggtcttggcgctgcgccggaactgccccggagtgaccccggtgaaacgccggaaggtcgtggagaagtgcgcctggtcgtagaagccgaggtgctgggcgagttccgccagcggccgttcttccagcaacaggcgcttggcctggcgcacccggcattgcagttggtaggtatgcggcggcacgccgtaggcacgccggaaagcctcgatcaggtggcgcgggtggcgctgcagcaactgcgccagttggtccagaccgagcgcctcggtggcatgcgcctccaggtaatcgcgcaggcgtgcggtggttccgccgtcgcggggcgccgcagccgccgggcgcaagccgccgtggcgcacgaagacctgttcgagcaaggccagcaggcggctttccaaccccaatgcgtcgctgcgctggaaatcctcggccagccacgccaggccagccgccacgctgccgtcgtcggccgggttcagttcgccgaagccgcgcggcaactgtttgcggccgagcaggccgagcaggcgcgtttcctcgacatagagcatccggtagaccagccgctcggattcggcgtgcccggtatgtggctcttccgggttcatcagcgacagggtgccggccggcagcgcatggcgccgcccgcggcactggtagccgccgacgccgtggaggatcgagccgatggcgaaggccgaatggctgtggcggccgaacgcctggccggagaagtccgcatggaacagctccacgccaggcagccagggacgcgccaacaaccggttggcagccatcaggcgtccccgagtaccgccgcgtagccctcgcggtagctgggatagcgcggcacccagccgagcgcccgggcgcggcgattgctgcaacgcttgctgccggcgcggcgtaccgaatgttcgtcggcccattggctgacgcccaggcgctggcgcaggtagtcgaccacctcgtgcatcgccacgggcgcgtcgtcgacaccgatgtagcagtcctccaacgcctggccgccggcatcggcgcgcaacaggaaggccagcagcccggccgcatcgtcggcgtggatccggttggcatacaggggcggctcgctgaccacccggtacccctggcgcacctggttgagcagccactcccgccctggaccgtagatgccggccaggcgcacgcgggtagccggtatcccgctgtccagcgcgacctgctcggcgtcgagcatgatccgtccggaataggcctgggaacgcgccggcgactcctcgtcgatccagccgccatcggtctgcgcgtagaccccggtgctggagacgaacagcaggcgcctgggccgctggccgcgggcctgcaaccagcccagcacatggcgcaggccgtcgacgtaggcggcacggtagccagcctcgtcgtgctgactggcggcggcgctgtacaccaggtagtcgagcggctcgctcggccactgcgcgggacactccggagcctgcagatcgccagccaccggcaggatcccctgcggcaaggcgtccaccgagcgacgcaggccatggacccgccagccatcggccagcagcgcctcgccgaggcgccctccgacatcgccgcagccggcgatcatcactgtttgcgacatgaagccgtctccttcctacaacaaggcgggcagtgtaggcgtcgaatcgtctgcaatgcacgcccgatcatgcccccggaggttggttcgcggcggtgcagccgctatgcttggccgatcttaacggatgagcagccatgaccctcaccgaactgcgctacatcgtcaccctcgcccaggaacaacacttcggccgcgccgccgagcgttgccacgtcagccaaccgaccctctcggtcggcgtgaagaagctcgaggacgagctgggggtgctgatcttcgagcgcagcaagagcgccgtgcgcctgacgccagtgggcgaaggcatcgtcgcccaggcgcagaaggtcctcgaacaggcccagggcatccgcgagctggcccaggccggcaagaaccagttggccgcgccgctgaaggtcggcgccatctacaccatcggtccctacctgttcccgcacctgattccccagctgcaccgggtcgcgccgcagatgccgctgtacatcgaggagaacttcacccatatcctccgcgacaagctgcgtaccggcgaactcgacgcgatcatcatcgccctgccgttccaggaagccgacgtcctgaccaagccgctgttcgacgagcccttctatgtgctgatgccggccgaccatccctggaccgccaaggccagcatcgattccgagctgctcaacgacaagagcctgctcctgctcggcgaaggccactgcttccgcgaccaggtgctggaagcctgcccgaccgtgcgcaagggcgacgagaacaagcacaccacggtggagtcctcgtcgctggagaccatccgccacatggtcgcctccggactgggcgtctcggtgctgccgttctccgcggtggacagccaccactacgcgccgggcgtcatcgaagtgcgcccgttcagcgcgccggtgccgttccgtaccgttgccatcgcctggcgcgccagcttcccgcgtccacgcgccatcgaagtgctggccgactcgatccgcctgtgctcggtggcccgtccgcaaacccaggaacaaccgcaaatcgcatgaccgagctgtccagggtcccggttaccgcgctaaagggcgtaggcgccgcgctggcggagaagctcgctcgggtaggcctggaaaccctgcaggacatcctgttccacctgcccctgcgctaccaggaccgtacccgcgtcaccgccatcggcgccctgcggccaggggccgacgcggtggtcgagggcgtggtggccggcgccgacgtggtgatggggcgccgccgcagcctgctggtgcgcctgcaggacggcagcggcaccctgagcctgcgcttctaccatttcagccaggcgcagaaggacggtctcaagcgcggcacccacctgcgctgctacggcgaagtccggccgggtgcctcgggcctggagatctaccatccggaataccgcgcgctgaacggcgacgagccgattccggtggagcagaccctgacgccgatctacccgactaccgagggcctcacccagcagcgcctgcgccagttgagccaacaggccctggccatgctcggccccagcagcctgcccgactggctgccggcggaactggcccgcgactaccaacttggcccgctcgaccaggcgatccgctacctgcaccggccgccgccggatgccgacatcgaggaactggccgaaggccggcactgggcgcagttgcgcctggccttcgaagaactgctgacccaccagttatccctgcagcgcctgcgcgaagccgtgcgctcgcaggcagcgccgcgcttgccggcggccagccgcttgccgaaacgcttccttgccaacctcggcttccagccgaccggcgcgcaacgccgggtcggcgcggagatcgcctacgacctggcccaggacgagccgatgctgcgcctggtgcaaggcgacgtcggtgccggcaagaccgtggtcgccgccctcgccgccctgcaagccatagaggccggctaccaggtggcgctgatggcgccgaccgagatcctcgccgagcagcatttcctcaacttcagcaagtggctccagccgctggacatcgaagtcgcctggctggccggcaagctcaagggcaaggcccgcgcggcggcactggaacgcatcggcgacggcgcgccgatggtggtcggcacccacgcgctgttccaggatgaagtgaaattcaagcgccttgcactggcgatcatcgacgaacagcaccgcttcggcgtgcagcagcgcctggccctgcgccagaagggcgtggacggcaggctctgcccacaccagttgatcatgaccgccacgccgatcccacggaccctggcgatgagcgcctatgccgacctcgacacctcgatcctcgacgagctgccgcccgggcgtaccccggtgaataccgtgctggtggccgacagccgccgtatcgaggtgatcgagcgagtccgcgcggcttgccgcgaagggcgccaggcctactgggtgtgtaccctgatcgaagagtccgaggagcttacctgccaggccgccgagaccacctacgaagagctttcctcggcgctgggcgaactgcgtgtcggcctgatccacgggcgcatgaagccggcggacaaggccgtggtgatggaggccttcaaggaaggcatgttgcaactgctggtggcgaccacggtgatcgaggtcggcgtcgacgtgcccaacgccagcctgatgatcatcgagaaccccgagcgccttggcctggcccaactgcaccagctacgcggccgggttggccggggcagcgccgccagccactgcgtgctgctctaccacccaccgctgtcgcagatcggccgcgagcggctgggcatcatgcgcgaaaccagcgacggcttcgtcatcgccgagaaggacctggaattgcgcggccccggcgaaatgctcggcacccgccagaccggcctgctgcaattcaaggtcgccgacctgatgcgcgacgcagacctgctgccggcggtccgcgatgccgcccaatccctcctggcgcactggccgcagcatgtcagcccgctgctcgaacggtggttgcgccacggccagcaatacggtcaagtgtgatctatttcgctctcgctgaccggcgtaggtctcagtcttgaagcagctctggttatactgagggaaaatccagctcgcatggtctcgtcatgacagaagccgccctggcctccgccgatgctccgcacgccccccaggtcatcctccagctgctcgccaagctaggcatcgcctgccgcgaggtcagcgacagcgcggagctgcctgccgcccgccgggtccaggcggtgctgctggacgacgccgtcggcaccctgctggtgctgttcccgcagagccagttgctggacctcgcccggctcaccgaactgaccggccgcaagctgctggcgatcaagcccgagcgcctggaacgaatgctcggcaagcacgagttgcaccgcctgccggcgttgccgcccctgaccagttcgccctgcctgtacgacgagcgcctgttgcaggaaccgcgcctgctgatcgagtccggccagcccggcatcctcctggagatcgccagcaacgacttccgcggcctgctgggcaaggccagcgccgcgcgcttcggcgaaccgctggaaaacatcaacctgaaccttgaccgcccggacgacgaccgcgcggaaatcagccaggccgtgcaggccttcaccgcccggcgcatccagcagcgcctggagcagaccatcgagattccaccgctgccgcagacggcgcagaagatcatcaagctgcgggtcgaccccaacgccagcgtcgacgacatcaccggcctggtggaaaccgatccggcgctcgccgcccaggtggtcagttgggcggcctcgccctactacgccgcgccgggcaagatccgctcggtggaagacgcgatcgtccgcgtcctcggtttcgacctggtgatcaacctggccctcggcctcgccctgggcaagagcctgagcctgcccaaggaccagccacagcaggccacgccctactggcagcaagcgatctacaccgccgcggtgatcgagggcctgacccgcgccatgccgcgcgagctgcgcccggagtccggcctgagctacctgggcggcctgctgcacaatttcggctacctggtcctggcgcatgtcttcccgccgcatttctcgctgatctgccggcacctggaggtcaacccgcacctcggccatgcctatatcgaacagcacctgctggggatcacccgcgagcagatcggcgcctggctgatgcgcgtctgggacatgcctgacgacctctattgcgccctgcgcttccagcaggaccccagctacaccgggccgaacgcggtctacgccaacctgatctgcctgaccaaccggttgctgcgcaacagcggcatcggcgatggcccgcagcaagcgattccggcggcattgtacgagcgcctggggatcaccccggagaaggccggggacgccgtgaaaaaggtgctggaagcggaagcggccctgcgcgaactggcggcccagttcaatcgcttgccggggtgaccgggtagtccgctgcaaaacgcactaccgaaaggctgcggccgcagcccggatgagatcgaaagccgccctcaggcggctttcttctccggagccttcttcttcggcttgaggtacttcaccagaccctggaaccagatcaccagcgccggattgccctgtatctggatgtccttgttctggatgccctgcatgaaggccaactgcgggttcttcgaagtcatcgcggcgaaaccgtaggctccgtccttgaaccccagggaaaatgccggttgcggatgggtaccgcgcttgctgctgacgcgcaggtccctgaccaggtagtggcgcgccaccttgccgtcgagggtatgcaactggaacaccaggtccttgccctcgagctgcttctggaaagcgggattgtcgcggctggccttggccatcaggcgaccaagcatccacaggagaagacgaaatttcatgcacgcgcctcgatatccggggagatgagcggcgcattgtagctgttcgcgaggaggactacagctgtcctttcgatgagcgcggaagcgtcttcgacgaagcccggagccgctctgactccgggctctcggcggtcagttgaccgcgtcgcgcagggccttgcccggcttgaaggcgacggtgttgctggccttgatcttcaccggctggccggtctgcgggttcttccccgtgcgggctccgcgatggcgttgcaggaaggtgccgaaaccgaccagggtcacgctgtccttgcggttcagcgcgccggtgatttcatccaacagggcgttgagaacgcgattggcctgttccttggtgagatcggccttttcggcgatagcggcggctagttctggtttacgcatagttgcctctttgacggtttgttgtttttgtgtccgtgctgtcttcccagcagcgctcaaaggcaccgcagtccaccggaaccataggctctagactgcggtagacgcgatggaggatggcatgctcccgaggactgcgccagtatcgtccgacaattttgccgcaagtctcgacggcataacggccggaaccaatggcattcaagccatgaggccgggtaactctttgttcagggccaatttttcgttcaccgccgctccggtcagggcataaccgatcactcgaccagcggtatcccggcacaggaccttgaggtccgttccagagccttccactagccattggccatccattccgcggggcggcggcgacaccaccagcgggcaggccggggtcttcaccgtcaccggcatgggaccgtaggccacctggctggggttgccggcgagggtctgcgccagcgcgcgtgcgcaggccatcagcggcatcacatagagcaggttgaggccgtccacttcggcgcagtcgcccagcgcgtagatgttggcgtgggaggtgcgcagcgagcggtcgacgacgatcccgcggttgaccgccagcccggcggcgaaggccagttcggtgcgcggacgcaggccgacggcggagaccaccaggtcgcagggaatcacctcgccatccgaaagatgcgcttccagcccctcgccggccttcttcaggctggccagcaccggccccaggtggaagcgcacgccgaggccttccaggcctgcctgcacggccttcgccgcggccgggtggagcaggcccggcatgacctgctcgcaaggcgccaccacgtcgagctggtagccgccgctggagaggtcgttggcgaattcgcaaccgatcagccccgcaccgagcagcagtacccggtgcttgccggcagccgcctggcggaagcgcgcgtagtcttccaggtcgttgatcgggtagagcgcgtcctgggcatcgccctcgaccggcacccggatcggctccgcgccccaggccaggaccaggtcgcgataacgcacctcttcctcgccgatccagatccgctgatggccgggatcgataccggtgacccgggtatgggtcaggatgcgtgcgttcagttgctcggccatggcgcccggttcggccatggccaggccgtcggcgtccttgttcttcgagaagccggtggagagcatcggcttggaataggaacggccgtcgtcggcggtgatcatcagcagcggcgtctcgctgtccagcttgcgccactcgcgggccaggttgtagcccgccaggccggttccgatgattaccaggggcgcacgctcgctcatttccgttcctctgtgattgccggcgccgggcgccgcttctgtggatttcgctcaggcgatctcgatcatctcgaaatcgatcttgccgacaccgcaatccgggcagacccagtccgccgggatgtcttcccaacgggttcccgccggaatgccttcttcgggcaggcccagggcttcgtcgtagatgaagccgcagaccacgcattgccacttgcgcatagccaccctcctcgttcgtcgaacctagctcagcgtcggtggccggccaacggcaaggctgccgggcgttcccggcaggacagtcaatgaccggacccaagtcccaaggataactcctggacggccgctggccaggcatgaaaaaaggcggccagggccgccttcttcgccggcgagcggggctcagccgatttcgatcatctcgaagtccagcttgccgacgccgcagtcggggcacagccagtcttcaggcacgtcttcccagcgcgttcccgcctcgatgccttcttccggccagcctttggcctcgtcatagatcagtccacacaccacgcattgccacttcttcattgtttacctcgggcgggttaccacggttcagcgccggcaacctataacaaatccaccctgtccgccaacctgcccgaaaggcaaggtggtgccgaacgggccaaccaaagatgggtggtgcccaccggtcgcctcacaacccctcggctccgatccgcgccacccgggcgtcctcttcggcgcgtacgccggaaaccccgaccgcgccgaccacctgtccgtccaccaggatcggcacaccgccctccagggtggcctgcagcagcggcaccgagaggaaggcgctgcgtccgccgttgatcatgtcctcgtagcgcttcgtttcccggcgtcccagggcggcgctgcgggccttttccgtcgcgatgtaggcaccgatcggcgcgcagccgtcgaggcgctccagcgccagcgggtggccgccgtcgtcgaccaccgcgatgctcaccgcccagccttggcgctgtgcctcctcgcgggccgcgccaaggacgcgggcgacctcctcgcggccgagtaccggcttgctgtgcatggtttcactctcctccgggcaaggcctggtcgagcagctcgatccagtggcgtaccggggtccgtccggccccgtcgagatgggcctggcaaccgacgttggccgtggcgatgacatccggcgcgccgctttccagggcgtccaggcggttgtcgcgcagacgccgggacagcgccggctgggtcagcgagtaggtgccggcggacccgcagcagagatgaccgtcggccacctcggtgagatggaagcccagtcgccgcagcaccgcctccacggccccgcccagtcgttgcgcgtgctgcagtgtgcatgggcagtggaacgccaggcgctggtcgcagcgcaggccgagggactccagcggctcgtcgcgaagcacttccaccaggtcgcgggcagcggcggcgacctcgcgcgccttgtccgcgtaccgtgggtcgtcgcgcagcaggtaggcgtagtccttgacgaaggcgccgcagccgctggcggtctgcacgatggcctcggcaccctcgcgcagcaacggccaccaggcgtcgatattgcgccgcgcgcgctggcggccgcgctcctgcgcatccaggtggaaatccagcgcgccgcagcagccggccgcggccgccggcgtcacgctgattcccaggcggtccagaacccgcgcggcggcggcgttggtgttcggcgacagcgccggctgcacgcaaccttcgagcagcagcacgcgccgcgcatgccggggctgcggccgcctgcccggcgccgcgacccgacgtggcagcttgccctgcatcgcctcaggcagcagaggcctcagccgcccggcagcgccggccagcgcgccgaacaaccccgggcgcggggccagcaggcgcagcccgtcgcgcagcaggcgttgccggaagccgcgcggcaggcgttcggcgaggaggtcgcggccgatatccagcagcttgtggtactcgactccggacgggcaggtggtttcgcagttgcggcagctcaggcagcgatcgaggtgcaggcgggtgcgctcgctggcctcgtcgcgctcgaggaactgcttgatcaggtagatccgtccgcgcgggccgtcgagttcgtcgcccagctcctggtaggtcgggcaggtggcgttgcagaaaccgcagtgcacgcagctgcgcaggatgcgctcggcttcggcggcctcggcgcgttgccgggcggaatcgcagaggttggtttgcatcgcgcctcctcagagttcggcgtacatccgcccgggattgaagatgccctgcgggtcgagctggcgtttgagtgcccggtgcaggccgagcagtccaggcggtagcggctggaacggcgcatcgagatggccggcgcggtagcaggtggcgtgaccgccatgggcggcggcccacgcacggatgtccgcggccggcgcgtcgcttttcagccagcgcagcgccccgccccagtccagcaactgacgaccgggcaacggcgtctccggcgccagcgccggcagcgacaggcgccagagcggtcgcgggtcgtcgaagaacggcaggcgctgctcgcgcaggtcggcccagaagccgtcctcgagcgcttcgccaccgaggcggtcgcgcgccgagcgtaccgagccctcgccgccctccaggcgcaggcgcagggcttcgccgtcatggcaggccgcactgatcggcaatggctggcctccccactcggccagcttgcgcaacgccgtcgccaccggcaggtccaggctcaggccggcctggcagcgcggcatgggtagcaccttgaaggacacttcggtgaccaccccgaggcaaccgaagctgcccgccagcaaccgcgacaggtcgtagccggcgacgttcttcatcacctcgccgccgaagcgcaggtgggtgcccaggccactgatcagccgcgtcccgaggacgaaatcgcgtaccgctcccgcccagggccggcgcggtccggacaggccgctggcgagcaccccgccgaccgtcgcccggccgccgaaacccggcgcctcgcaggcaagcatctgcccgccgcgcgccagcacggcctgtagctcgtccagcggcgtaccggcacgggcggtgatcaccagttcgcagggatcgtaggcgacgatcccacggtgttcggcgagcgccagcggttcgcccgcaaccggcctgccgaggaacgccttgctatcgccaccgacgatgcgcagcggcgcgcgccgcgccagggcgtcgcggacccgctcgagcagcgcgccggcatggtcggcgccagcgtccggatcgaaatacggctggctcatcagaaacgctccagttcggggaacggcagtcgaccgtggcggacgtgcatggcgccgaactcggcgcagcgatgcagggtgggcacgttcttgccgggattgagcagcccggccgggtcgaacgccgccttcacggcgtggaacagggtcagctcgtcggcattgaactgagcgcacatctggttgatcttctcgcggccgacgccatgttcgccggtgatgctgccgcctaccgccacgcacaactcgaggatcctgccgcccagcgcttcagcgcgctccagctcgcccgccaggttggcgtcgaagaggatcagcgggtgcatgttgccgtcgccggcgtggaatacgttggccacccgcaggccgtattcgcgcgaaagctcggcgatgccatgcagcacccgcggcagctcgcggcgcgggatgctgccgtccatgcagtagtaatcgggggaaatccgcccgaccgccggaaacgcattcttgcgcccggcccagaagcgctggcgctcggcctcgtcttgggcctgtcgcaccgaggtggcgccagccgcctcgaacagctcgcggacccgctcgcaatcctcgtgcacgtcggcttccacgccatccagttcgcagagcaggatcgccgccgcgtcgaccgggtaaccggcgtggatgaaatcctcagcggcgcggatcgacaggttgtccatcatttccagcccggccgggacgatgccggcaccgatcaggtcggccaccgcccgcccggcgctttccacatcgtcgaagctggccagcaggaccttcgccaccggcgggcgcggcaacagcctgacggtgacctccaccaccacgccgagcagcccttcggagccggtgaacagcgccagcaggtcgaagccggcgctgtccagggcgctggaccccaggctcaggcgctcgccttccagggtcacgatgtccacctgcaacaggttgtgcacggtcaggccgtacttcaggcaatgcacgccgccggcgttctccgcgacgttgccgccgatggagcaggcgatctgcgaggacgggtccggtgcgtagtacagaccatgaggggcagcggcctgggagatcgccaggttgcgcacgccaggctggacccgggcgaaacgacccagcggatcgatctcgaggatccgccggaaacgcgccatcaccagcagcacgccgttctccagcggcagcgcgccgccggacaggccggtgccggcaccgcgcgccacgaccggcaccttcagccgatggcagagggcgagcaggccctgaacctgttcgatgcgttccggcaatgccaccagcaacggcgtgcagcgatacgccgagagtccgtcgcactcgtagggacgcaggtcttccgcggcgtgcagcagttcgaggtcgggcaggcggaggcgcaactcggccagcaggccatccttgtccacctgcggcagcggaccgtccagacgctcgtcgtagaggatgttcatggcggctgtcctgttgtggttgtcggcgggatcagcaagcgtccacagcctgtaccgcgcggacgccggggtccagcaggcgtctaactggtcctaccagtatcaccaggagccatgggcatgaggcgcatgctagaaagtccctgagcttctatagtgagtaacgacagccaactggtcctaccagcgcaacgggagcttccatgcagaaacagcgggtggccgaccaggtcgccgagcgtatcgagcggttgatcgtcgacggcgtgctcaaggtcggccaggcactgccgtccgagcggcgcctggtggccaagctcggctgctcgcgctcggccctgcgcgagggcctgcgggcgctgcgcgggcgcggcatcatcgacaccgagcatggccgtgggtcgttcgtcgccgacctcgaccgcaacgccgacgtcagcccgctgatgcacctgttcggctcccagccgcgcaccctctacgacctgctcgaagtccgcgccctgctggagggcgaggcggcccgcctggcagcgctacgcggcaccgaggcagacttcgtcctgctcgcccggcgctacgaagagatgctcgccagccacgaggaaacccagccgatcgatccccgcgagcacgcccgccgcgaccacgcgttccaccgggcgatcagcgaggcatcgcacaatccggtgctggtgcataccctgcaatcgctcaacgaactgctgctgagcacggtgttcgcctcggtgaacaacctctatcaccggccgccgcagaagcgccagatcgaccgccagcacgcgcgcctctacgcggccctccgcgagcgccagccggaccaggcgcaacgggcggcgcgcgaacatatccacagcatccgcgacaacctgcgggagatcgagcaggaagaacagcgcctggtccgcgccaccctgcgcctgaacggctgggggtgacgcgccaccgcgtcgcagaccggccgccggccgaacgtgctaccctcgccgccttctgccgccgtctcgtagtcccgtcatgcccagcaatgcgctctggcttcgcgccgaccaactgtccagcgtctcccccgccgtcctcgactggctgttcgacgaggggtcgctgacccggcgcctgaccgccctggccgacggcgcgttccgcgtcgaacccctgctggaaggctggcagaccctgcgcgacgacgaatgccaggggctcgacgtccctaccggcagtagcggctgggtccgcgaggtctacctgcatggccacgaccgtccctgggtgttcgcccgcagcgtggcggcgcgcagcgccctggaaggctcgggcttcgacctggcgctgctcggcacccgctcgctgggcgagttgctgttcagcgacagcgccttcgagcgcgggcccatcgaagtctgccgctatccggcggccggtctgcccgccgaggtccgcgccgagggtctctggggccgtcgctcacggttttcccgcggcgcgctcggggtgctggtggcggaggtgtacctaccgcgcctgtgggaccaggcgggaatcgccgacgtataatcccccggtcgactccggaggtccccatgttcgtcaccctgatcaagccgctggcccgcctgcacccccgcgcctgggacttcgtccaactggtgcggctggaccggccgatcggcatctacctgctgctctggccgaccctctggtcgctgtggatcgccgcggacggcgtgccggaactgaagaacctgctgatcttcgtcctcggcgtcatcctgatgcgcgccgccggctgcgtgatcaacgatttcgccgaccgcaatttcgacggccacgtcgcacgcaccaaggcgcgcccgctggccaccggcaagatcagcgtgcgcgaggcctggatcaccttcgccgtcctggtcgcgctgagcttcggcctggtcctgctgaccaacgcaacgaccgtctggctgtcgttcggcgcggtagccgtggcctcgctctaccccttcatgaagcgctacacctactatccgcaggtggtgctgggcgccgcctattcctggggcatcctgatggccttcaccgccgagcgcggtgaactgccggccagcgcctggctgctgttcctggccaacgtgctgtggacggtcgcctacgactcctactacgcgatgaccgaccgcgaggacgacctgaagatcggcatcaagtccaccgcaatcctcttcggcgatgccgaccgcctgatcatcggcagcctgcagggcctgaccctgctcctgctggcgctggccggcaaccgcttcgaactgggcctgtgcttctacctcggcctggcggtggcggcggcctgcttcgtctgggaagcctggtcgacccgcgaccgcgacccgcaggcctgcttccgcgccttcctgcacaaccactgggctggcctggcgatcttcctcggcacggtcgccgactacgcgctgcgttgagcggcgcgcaggccggcgaccgtctagtccatgtccggctgggcgacgtgccaggcgcccatcttgccgtcaccgttcttgtcgccaggcttcttgtcctggatgaaggtataaaggggcttgccgtagtaggcccactgctgggtgccgtcctcgcgagcgaccaggctccagtcgccgctggcctgcgctccctgggccgctgccagcggcggccagttcttcgcgcactgcccggaacaggcggattgcccttcgctgtccttgtcgtaggtatagagcgtcatgcccttgccatcgaccagcacgccgtccttttcggtggccggcgccaccgtttcctgggccagcgcggcgaacgccggcagggccagcgccagacccagcgccaggtggattctgttcatcgcgtctctctcctgtgtcttcaggtggagcgttcgccgcccgcagggacggcaccggaacctgttgagcatagccccgccgcgggcagtcggcggaaactacgccgttgtgtcacatacctgacacaatttcgttatctaatgcggcgcaagacagatcgacccgaggcaagaccatggttggcaagacaatcctcatcgttgatgacgaagcaccgattcgcgagatgatcgccgtggccctggagatggccggctacgagtgcctggaggcggaaaatacccagcaggcgcacgcggtgatcgtcgaccgcaagccggacctgatcctgctcgactggatgctccccggcacttccggcatcgaactggcgcgacgcctgaagcgtgacgaactgaccgtcgacatcccgatcatcatgctcaccgccaagggcgaggaggacaacaagatccagggcctggaggtcggcgccgacgactacatcaccaagccgttctcgccccgcgagctggtcgcccgcctgaaggccgtgctgcgccgcaccgggcctggcgacagcgaggcgccgatcgaggtcggcggcctgctgctggacccgatcagccaccgcgtgaccatcgacggcaagccggccgagatgggccccaccgagtaccgcctgctgcagttcttcatgactcaccaggaacgcgcctatacccgcggccaactgctggaccaggtctggggcggcaacgtctatgtcgaggagcgcaccgtcgacgtgcatatccgccgcctgcgcaaggcgctcggcgaggtctacgaaaatctggttcagactgtccgcgggaccggctatcgtttctccaccaagagctgaccccgctcccggccgcccagcggccggagtcgtttcccctggacggtccgtgacggaccgccactggacaggatgcaatccgtcgtgaaccaagactggcgtggagcgctgatccgccacctgcttctcgtgctggccgccagcctcgtgctcggcgtggtcagcggccattacggctgggccctggccctcggcctggctctctacctcggctggaccctctggcagctactgcgcctgcaccagtggctgcgcaaccaccagccagacgagccaccgccggacagctacggcctctggggcgaagtcttcgacaatatctaccacctgcaacgccgcaaccagcgcgcccgtggccgcctgcaggcggtgatcgaccggatccaggagtccaccgcggccctgcgtgacgcggtgatcatgctcgacagcgacggcaacctggaatggtggaacctcgccgcggaaaacctgctcggcctgaagaccccgcaggacggtggccagccggtgagcaacctgatccgccatccgcgcttcaaggaatacttcgaccaggaggattaccgcgagccgctggaaatcccctcgccgatcaacgagcgcctgcgcctgcaattccacatcaccctctacggcaaccgcgagcacctgatgctggtccgcgacgtcacccgcgtccaccagctggagcagatgcgcaaggatttcgtggccaacgtctcccacgagctgcgcacgccgctgacggtgatcgccggctacctggagaccctcctcgacaacgtcgaggatgtgaacccgcgctggctgcgcgccctgcagcagatgcagcagcaggccggacgcatgcagaacctgctcaacgacctgctcctgctggccaagctggaggccaccgactaccccggcgacaacaagccggtggcggtggacgttctcctcgccagcatccgtaacgacgcccaggccctgtccgccgggcgcaaccaccgcatcagcctggacgccgcacccgctgtgcagctcaagggcagcgaggcggaactgcgcagcgccttctccaacctggtattcaacgcggtgaagtacacccccgacgaaggcgagatccgcatccgctggtgggccgacgaacagggcgcgcacctgtcggtgcaggacaccggtatcggcgtcgaccccaagcacctgccgcgcctgaccgagcgcttctaccgggtggactccagccgcgcctccaacaccggcggcaccggcctcggcctggccatcgtcaagcacgtgctgatccgccaccgcgcgcgcctggaaatcagcagcgtgcccggcaagggcagcaccttcacctgccatttcgccccggcgcaggtcgccgaggccgagcgcaaggcgccgaagtgagcctcgtcgcggtgccgcgccgccggcgtcggcacggccaaggcttgcaagcgacgacacagcccctcattcttaagggccttttggctaccgcacacccccatggacccttctcctagtaccagcatcgccacctatttcgccgatgccggcctgatcctcttcgcgcttttcctcgtcctgctcaatggcttcttcgtcgccgccgagttcgccatggtcaagctccgcgccacccgcgtggaaaccatcgccaagcagcacggctggcgcggcgccatcctgcgcaaggttcacaaccagctggacgcctacctgtccgcctgccagctgggcataaccctggcctccctgggcctgggctgggtcggcgagccggccttcgccgaactcctggaaccgctgctggcgatgatcggcgtgcattccgacgaactgatccgcggtatctccttcttcaccgcgttcttcatcatttcctacctgcacatcgtggtcggcgagctggcgcccaagtcctgggcgatccgcaagccggaactgctgtcgctgtggacggcggtgccgctgtacctcttctactggctgatgtacccggcgatctggctgctcaacgccagcgccaacgccatcctcaagatcgccggccagggcgagcccggcccgcaccacgagcatcactacagccgcgacgaactgaagctgatcctccactccagccgcgcccaggaccccagcgaccagggcatgcgcgtgctggcctcggcggtggagctgggcgaactggaggtggtcgactgggccaactcccgcgaagacctggtctacctcgagcacgacgcgccgctggctgacatcctcgcggtgatccgccgccataagtacagccgctacccggtctgggacagccacaagggcgagttcatcggcctgctgcacatcaaggacctgctgctggcgctgtccgccctggacagcctgccggagaccttcgacctcgacgaactggtgcgcccgctggagatcgtcaccaagcacaccccgctgtcgcgcctgctggagcagttccgcaagggcggcgcgcacttcgccgtggtggaagaggccgatcacaaggtggtcggcttcctgaccatggaggacgtgctggaagtgctggtcggcgacatccaggacgaacaccgcaagaccgagcgcggcatcctcgcctaccagccgggcaagctgctggtgcgcggcgacacaccgctgttcaagctcgagcgcctgctcggcatcgacctcgatcatgtcgaggcggacactctcgccgggctggtctacgacaccctgaagcgggtgccggaggaagaggaagtcctcgacaccgagggcctgcggatcatcgtgaagaagatgcgcggtccgaagatcgtcctggccaaggtggtcaagctcgactgagacgagccggcgccgccacggcgccggcgacttttcaaggctcgcggacgatggcgaagttcggcaggctgtcgaccggctgggcgaagtcgtagggaatcgactccagcgccaggccgacgttgcgctggatcacgaagtgcaggtgcggcccgctgctgttgccggtgttgccggagcgcgccagcggcgtgccgacctggacccgctggccctcggcgaccagtaccgaatggcgcatcaggtgcaggtagacgcccatggtgccgtcgtcgtgcaggatgcggacgaagttgcccgagggattgttgccgcgcccgctctggttgttctcgatcttcaccacggtgccgccgcgggcagcgatgatcggcgtgccctcgggcatggcgatgtccatcgcgtagcggcccttgggggtgaagtggctgtacttgccattggcgccctgggacaggcggaacggcccgccgcgccagggcagcggatagcgatagagcagcggctgctggcgcgggtcgccgagcgcgtaacgcagcttcggggtgtagctcatcggcttgccggccttgcgcggcgccagggtcgccaggcgcacctggctgcgcgccgggaccacccagcgaatcggcccgtcgggcaccccaacggcattgcgcgggttgcggatccgcaactcgacctcgaccggcgcgtagaggtcgttgcgcacctgcagggtctcgccacccgcgtgcttcttcgtctccagcttcacttcccgttccaggtgctcgaccatccggtcgcggaagacgaacacctgcgccccggccacggcgcggtcggagtaggtcaccacgccattggcgtcggtgtacttgtagatggtcagggccgcagccggagctgccgcggcgaacaggccacagagaaggagaaggcgccctagcatgactgcacggatcgtgtcgttctggttatcccgaatcggcaagactagcagcgctttattgccagggcgagacgacagcgagcgggctgtgaacggatcgtcgggaaaaaaccgctcaggcgccgggaacgtagtgcttctgggtacttccgcgggcgatcaggcgcgacaggtagtcgagcttctgcgggtcgcggtcgacgaaacgcagggtcaacagcagccaatcgctatccggcttcggctccagcgcggcgatggcgtgcaggtagccgttcaggcgcgccacgtcgctgttttcctcgaggtccagcaccgcgctttccagcacctgcggcaacgggtcggcgcgcttcaccaccagttgcgcttccttcagactgaccgccttgatcacgcagggcatgctgctctgcggcaggcgcaattgcgcctggcccagcgggttgccgctgccggcgggacgcgcgctggcctggggagccgaagccggcttcggcgcgggggccggttttgccggactggcggcgggcttgatcacctcggcgcgaccaccggtcagggcggccagcgaatcgttgaccatgccgctggcgatctcccggcgcggcgcgtgggccgccagggcttccagcttgccgctgcggctcagggccttcttgatcttggccaccagttggtcattggagaatggcttgccgatgtagtccgacaccccggcctggatcgcctggaccacgttctccttgtcgccgcgactggtgaccatgatgaacggggtagtcttgaggttttcctgggcacggcaccaggtcagcagttcgaggccggacatctccggcatctcccaatcgcagaggatcaggtcgacgttctgccgactgagcagttgctgggccttgcggccgttcacggcctcctcgatatgaaggccggggaagttgtcgcgcaaccctttcttcatcagatctcggatgaagggggcgtcatccaccactagcgcgctgactttgctcatcgacttctcctggacaggtccgcctaggatagcctcccctgctggcaggatgccaagccttgctgcagtcgcgcgaagaaacaaggctccaggtcaagggagccttgcctgcggaagatcactcgccgcggttgttctcgacctcttccttcatgcgggtcaggccgatgtggcgaacgtcggtgccgcgaaccaggtagatcaccagctcggcgatgttgcgcgcatggtcgccgatgcgctccagcgagcgcagggcccagatgatgttgagcacgcgggatatcgcccgcgggtcttccatcatgtaggtgaccagctcgcgcagggcggtcttgtactcgcgatcgacggtcttgtcgtactgcgccacggacagcgccaggtcggcatcgaagcgggcgaaggcgtccagtgcctcctgcaccatcttctgtacctggctgccgatgtgccgaacctcgacgtagccgcgcggcgactcgccttcctcgcacagctggatggcgcggcgggcgaccttggaggcctcgtcgccgatccgctcgaggtcgatcaccgacttcgagatgctgatgatcaggcgcaggtcggaggccgccggctggcgccgggcgaggatacgcacgcactcctcgtcgatgttgcgctccatctggttgatctggtcgtcgatctcgcggacctgctgggcgaggccggagtcggcgtcgatcagcgcgttgaccgcgtcgttgacctgcttttccaccagcccgcccatggccaggaggtggctgcgcacatcctccagctcggcgttgaactgctgggagatgtgatgggtgagactgtctttgttgatcatgtggggaatccttctggagccgctgcgaccggtgacatcaacgagctacggagagcgccggaggcagcggtatcgccgcgcctccggacgcgccgctagccgtagcggccggtgatgtagtcttcggtctgcttcttcgccgggttggtgaacagcgtatcggtgtcgccgaactcgatcagcttgcccatgtacatgaacgccgtatagtcggaaacccgcgcggcctgctgcatgttgtgggtaacgatgacgatggtgaacttcgacttcaactcgtagatcagctcttcgatcttcagcgtggagatcgggtccagcgccgagcacggctcgtcgagcagcagcacttccggttccaccgcgatggtccgggcgatcaccaggcgctgctgctggccaccggacaggccgagggcggactcgtgcaggcgatccttcacctcctcccacagcgcagcccccttcagcgcccactcgacggcctcgtcaagtacgcgcttcttgttgatgccctggatacgcaggccgtagaccacgttctcgtagatgctcttggggaacgggttgggcttctggaacaccatgccgacgcgacggcgcagctcggcgacgtcgacgcccttggcgaagatgttgtggccatcgaggcgaatctcgccttcgacgcggcagccatccaccaggtcgttcatccggttgaagcagcgcagcaaggtcgacttgccgcagccggacgggccgatgaaggcggtcacgcgctgcttcggaatgttcatccggacgtcgaaaagggcctgcttggcgccgtagaacaggttcagcccgggcacttccagttcgacactttcggaagccaggtcgaggctctggcggtcgcggccgagcgcatcgaagttgatgccgtggctggcggtctcgttttgcatgggaagctccctcaatcagttttccagggccttgtacttctcgcgcaggcgattgcggatcgcgatggcggagaagttcagcagggcgatcaccacgaccagcagcaacgccgtagcgtataccagcggccgtgcggcctcgacgttggggctctggaaaccgacgtcgtagatatggaaaccgaggtgcatgatcttctggtcgagatgcacgtacggatagttaccgtcgaccggcagcgacggtgccagtttcaccacgccgaccagcatcagcggcgccacttcgccggcggcacgggccacggcgaggatcaggccggtcatcatcgccgggctggccatcggcaggacgatcttccacagcgtttccgccttggtcgcgccgagcgccagggagccttcgcggaccgcgcgcggaatccgcgccaggccttcctcggtggcgacgatcaccaccggcacggcgaggatcgccagggtcagcgaggcccagaacagcccgggggtaccgaaggtcggcgccggcagggcctcggggaagaacagccggtcgatggaaccgcccagcacgtagacgaagaaacccaggccgaacacgccgtagacgatcgccggtacgccggcgaggttgttcacggcgatgcggatcacccgggtcagcggcccctgcttggcgtactcgcgcaggtagaccgcagcgatcacgccgaacggggtgacgatcagcgccatcaccagggtcatcatcacggtgccgaagatcgccgggaagataccgccctcggtattggcctcgcgcggatcgtcgctgaggaactcccagagcttcttgaagtacaccgtcatcttggtgcccaggcccatggcgttgggctggtaggcatgcaccagcttgccaagggtgatttcgctctcgcggccgctggcgtcgcgcattaccacgctgtcgcggttgaactcctggtgcaggccgttgagctgctcttccaggaccttgtagcgcgcctgcaactcgctgcgctcggcggccaggtcggcctgggcggcggcgtccagcttgccgtccaactgcaacttgcgctctttcaggcgcaggcgctcgagaccgtggttgatcccgccgatgtcgcccttctccagcttgtagagcttggcgtagaggtcatccacccgctgcatgcgcttctgcagttcgcctaccgcggcgtcgccttcggcgaccacctggccgttctccttgacgctcagcaggtagccgtagaagttgccccactcgcggcgttcgagaaccatcagcgcttcgggacgcttgatgtcctgcagccactcgccgacgacccaggagaaatcgctgccgtaaagctcgcggttgcccagcttgagcagctcgcgggtcatgaattcggggccggcctccgggaccggcatgccggcgctgcgcaggcgcgcgcgcggcacttcctcagcctggaccacctcgccgatcacggtcttggcggcttcgccagggatctggtaagtcgcctcgatgacgttcgccggccagaagtggccgaggccgcgtaccgcgatcaccgccagcaggccgatggtcatgatcaccgcgatcgacaccgcgccggcgttcatccacacccagggcgagccgctgccgaaccaggctttgacggtttcctgtttctgtttcacagagctatacctccgccgcttacaacgacgcgtatttcttgcgcagacgctgacggatcagctctgccagggtgttcatcacgaaggtgaacgtcagcagtaccagcgccgagaggaacagcacgcggtagtggctgccgccgacctccgactcgggcatctccaccgcgacgttggccgccagggtgcgcatcccctcgaagatattcacttccatcaccggggtattgccggtcgccatcagcacgatcatggtctcgccgacggcgcggcccatgccgatcatcagcgccgagaagatgcctggactggcggtcaggatcaccacgcgggtcagcgtctgccagggcgtggcgcccagtgccagggagccgtaggtgaggctgcgcggcacgctgaagatggcgtcctcggcgatcgagaagatattcgggatcaccgcgaagcccattgccagcccgacgatcagggcattgcgctggtcgtaggtgatgcccaggtcgtggctcagccagaggcgcatgtcgccgccgaagaaggtggtctccaggtgcgggctcagccacagggcgaaggcgccgacggcaagcaccaccgggatcagcagcgcggcttcccagccggccggcaggctcagacggatacgctcgggcaggcggctccagagcaggccggcaagaaggatgcccagcggcgtcagcaacagcaggctgaacacacccggcaggtggccttcgacgtagggcgccaggaacaggccggcgaagaagccgaggatcaccgtcggcagcgcctccatcagctcgatcaccggcttgaccttgcggcgcatcgccggagccatgaaataggcggtgtagacggcggccgcgatggccagcggagctgccaggatcatcgcgtagaaggcggccttgagcgtgccgaaggtcagcggcgagaggctcagcttcggttcgaagtcggtggtcgcggcggtggactgccagacgtaggccggcttgtcgtagctctcgtaccagaccttgccccagagcgcgctccaggagatttccgggtgcgggttgctcagggcgaagcggtggatcttgccaccctgctccagcagcaggcggttggcccgcggcgacagggtgatgaccccggaagagtcggcgaccggctggaccagcagggtacggtgcgcggtgctgtggaagacgccgaggttgcccttctcgtccagggcgatgaagcccttgcgccgttgttccggagcgatggcgctgatcggcgcgccatccaggttgaagtcgcgaacgtgcgacaggcgcggttcgccgtcggtatcgcgagccatgaaccactgggcgatgccacccttggagtcgcccaccagcagcgagatgccgcccagcagttgggtgctcgcggtgacctcggcgttggggtcttccagcagcttgtagcgaccgttcaactggcggctgtgcaggtcgaacacatcggcggtggcacgtccgttgatcacgtacagccactgcttgcgcgggtcgaggtagatggctttcaccggttcggcgatctgcgggagttcgatgcgctcctcgtccagcgtgctttcgccggtcagcatgttctcttcccgagtcatgctcaacagcagcagttgcttgtcgacggagccagccagcagcaggctgtcgtcgccggcattgatgctcacatgctccagcgggcggccctgcggatcgagaccgatcggggtctcgccgtaggggaaggcgatctccggggtgatggtcttcttgttgtccgggtaggtgaccttgtaggtgtgctggaacaccagcacctgtccgttggacaggcccagggcgaccgtcgggctgcccggctggtcctgggcgatcgagcggatctcgctgcccgccggaagcggcagagcgacacgcttcagttcgacaccggtcttggcgttgaagaagagaatctcgccctggccgccgacgcgcatggccacctggttctgctcctcgatgctgagcagcaggggcacctgcgcctgctgcatccaggccggagtcagcgcttcgcgggtctccaggtcggcgccgcggaacagggggagcacgacgtaggccaggtagaagaagatcagggtgatcgccgccagcacggccaggccgccgaccagcacgtaccagcgggtcaggcggtccttgagggcacggatgcggcgcttgcgttgcagggctggcgtattgaagtcaatccgctcgggagcaagggaggagttcatcggggagttggccatgtcgttcatggggtgacaccctaaaggctctgtatgacagacagatgacagcaacatgacgcaacaaagcccgccagcagagcctcgctggcgggaaaggccggcggatcctagcgcccgccggcagagccttcatgcctggacggcccatcgctgggccatccgctcaagtcactggattacaggcccagttccttgatcgccttctcggccaccttggccggcagcgggatgtagccgtccttgaccacgacctgctggccggtcttggacagaaccagcttgaggaactgagcctccagcgggtccagcggcttgttcggcgccttgttcacgtagacgtagaggaagcgcgacagcgggtaggtgccgttcagggcgttctgctcgttgtcctcgacgaaggcagcgccttccttcttggccagggccacggtcttcacgctggcggtcttgtagccgataccggagtagccgatgccgttcagcgactggctgaccgactgcaccacggaagccgaacccggctgctcgttgacgttcggacggaagtcgcctttgcacagggcttcttccttgaagtagccgtaggtgccggaaaccgagttgcggccgaacagttgcaccggcttcttcgcccagtcgccggtcaggcccaggtcgccccaggtcttcacgtcctgcttgctgccgcacaggcgggtagcggagaagatcgcatcgacctgctgcatggtcaggcctttgatcgggttgtccttgtgcacgaagatcgccagggcgtcgacagcgaccgggacggcggtcggcttatagccgtacttctgctcgaaagcctgcagctcgacgtccttcatcttgcggctcatcgggcccaggttggcggtgccttcggtcagggccggcggcgcggtggaagaaccggcagcctggatctggatgttcacgttcggatagaggcgcttgtactcctcggcccacatggtcatcaggttggccagagtgtcggagccgacgctcgacaggttgcccgacacaccgctggctttctgatattccggcagcgccgggtcgatcgcggctaccgcggaagcggcgcctacgcctgcggcgacgaacgtcagggccgccatcaaacgcttgagtttcatgccttgctccttggacaggatggggttggatggaacgggggccagtatcgtcaggccgcatgaagactctatgaaaggaatgtgacagttggatgaaatgccatcagccttccgacatttttccgcaagccttgggagaagccctgccacacccctaaaagcctggaaacacaagggctctagcctttcacggaggggccggggaggccctctggagcgcgttttcgatccgcctgggggaggtagccgtccatccgtttcatgcaggatgggtagtttccagggcaattgtgacagtcgccgccggcattcgcagtcgagaaaagaagcgaggaagcacgcctttttccgcgcgcaaaagcaaaacccccggtcatcgctgaccaggggttttgggataggagcttgacgatgacctactctcacatggggagaccccacactaccatcggcgatgcgtcgtttcacttctgagttcgggaagggatcaggtggttccaacgctctatgatcgtcaagcaattcggttggatatccgttcgcttgggcttacgtctatccggattcaggtatgtgatttcaaggtgtttgcggttcatgcgaactttcggttcgtcgacttcaccttacaacacacaatcgtcagattgtttgggtgttatatggtcaagcctcacgggcaattagtactggttagctcaacgcctcacaacgcttacacacccagcctatcaacgtcgtagtcttcgacggcccttcaggggaatcaagttcccagtgagatctcatcttgaggcaagtttcccgcttagatgctttcagcggttatcttttccgaacatagctacccggcaatgccactggcgtgacaaccggaacaccagaggttcgtccactccggtcctctcgtactaggagcagcccctctcaaatctcaaacgtccacggcagatagggaccgaactgtctcacgacgttctaaacccagctcgcgtaccactttaaatggcgaacagccatacccttgggaccggcttcagccccaggatgtgatgagccgacatcgaggtgccaaacaccgccgtcgatatgaactcttgggcggtatcagcctgttatccccggagtaccttttatccgttgagcgatggcccttccatacagaaccaccggatcactaagacctactttcgtacctgctcgacgtgtctgtctcgcagtcaagcgcgcttttgcctttatactctgcgaccgatttccgaccggtctgagcgcaccttcgtactcctccgttactctttaggaggagaccgccccagtcaaactgcccaccatacactgtcctcgatccggatcacggaccagagttagaacctcaagcatgccagggtggtatttcaaggatggctccacgcgaactggcgtccacgcttcaaagcctcccacctatcctacacaagcaggctcaaagtccagtgcaaagctacagtaaaggttcacggggtctttccgtctagccgcggatacactgcatcttcacagcgatttcaatttcactgagtctcgggtggagacagcgccgccatcgttacgccattcgtgcaggtcggaacttacccgacaaggaatttcgctaccttaggaccgttatagttacggccgccgtttaccggggcttcgatcaagagcttcgcttgcgctaaccccatcaattaaccttccggcaccgggcaggcgtcacaccctatacgtccactttcgtgtttgcagagtgctgtgtttttaataaacagtcgcagcggcctggtatcttcgaccagccagagcttacggagtaaatccttcaccctagccggcgcaccttctcccgaagttacggtgccattttgcctagttccttcacccgagttctctcaagcgccttggtattctctacccgaccacctgtgtcggtttggggtacggttcctggttacctgaagcttagaagcttttcttggaagcatggcatcaaccacttcgtcatctaaaagacgactcgtcatcagctctcggccttgaaaccccggatttacctaagatttcagcctaccaccttaaacttggacaaccaacgccaagctggcctagccttctccgtccctccatcgcagtaaccagaagtacaggaatattaacctgtttcccatcgactacgcttttcagcctcgccttaggaaccgactaaccctgcgtcgattaacgttgcgcaggaacccttggtctttcggcgtgggtgtttttcacacccattgtcgttactcatgtcagcattcgcacttctgatacctccagcaagcttctcaactcaccttcacaggcttacagaacgctcctctaccgcgtcacttacgtgacacccgcagcttcggtgtgtggtttgagccccgttacatcttccgcgcaggccgactcgactagtgagctattacgctttctttaaaggatggctgcttctaagccaacctcctagctgtctaagccttcccacatcgtttaccacttaaccacaactttgggaccttagctggcggtctgggttgtttcccttttcacgacggacgttagcacccgccgtgtgtctcccatgctcggcacttctgggtattcggagtttgcatcggtttggtaagtcgggatgaccccctagccgaaacagtgctctaccccccagagtgatacatgaggcgctacctaaatagctttcgaggagaaccagctatctccgagcttgattagcctttcactccgatccacaagtcatcccctaccttttcaacgggagtgggttcggtcctccagtcagtgttacctaaccttcaacctgctcatggatagatcgcccggtttcgggtctatacccagcgactaaacgccctattaagactcgctttcgctacgcctaccctatacggttaagcttgccactgaatataagtcgctgacccattatacaaaaggtacgcagtcacctaacaagtaggctcccactgcttgtacgcatacggtttcaggttctatttcactcccctctccggggttcttttcgcctttccctcacggtactggttcactatcggtcagtcagtagtatttagccttggaggatggtccccccatgttcagacaaagtttctcgtgctccgtcctactcgatttcacttcaaagatcctttcgcgtacggggctatcacccactatggccgcactttccagagcgttccgctaaaatcaatgaagcttaagggctaatccccgttcgctcgccactactaagggaatctcggttgatttcttttcctcagggtacttagatgtttcagttcccctggttcgcctcttgcacctatggattcagtacaagatacctaggttatcctaggtgggttcccccattcagagatctccggatcaaagtctgtttgccgactccccgaagcttttcgcaggctaccacgtctttcatcgcctctgactgccaaggcatccaccgtatgcgcttcttcacttgaccatataaccccaagcaatctggttatactgtgaagacgacattcgccgaaaattcgcgcttgaactcgcaaattttaccttgacttgaatgatcaccagtgaaagagatcattcagtcttacttctatcacatacccgaatttttaaagaacagttctggtgcaaagaccagaaatcaatgttcattcacgaacattcatttctgagctttcgacgattgttttagatggtggagccaaggaggatcgaactcctgacctcctgcgtgcaaagcaggcgctctcccagctgagctatggccccgtatcggatcacgcagcacaccaacaattggtgggtctgggcagattcgaactgccgacctcacccttatcaggggtgcgctctaaccaactgagctacagacccaatcgtctaaccagtgaatcaagcaattcgtgtgggagcttatgaagaagctgagatcttcgattaaggaggtgatccagccgcaggttcccctacggctaccttgttacgacttcaccccagtcatgaatcactccgtggtaaccgtcccccttgcggttagactagctacttctggagcaacccactcccatggtgtgacgggcggtgtgtacaaggcccgggaacgtattcaccgtgacattctgattcacgattactagcgattccgacttcacgcagtcgagttgcagactgcgatccggactacgatcggttttatgggattagctccacctcgcggcttggcaaccctttgtaccgaccattgtagcacgtgtgtagccctggccgtaagggccatgatgacttgacgtcatccccaccttcctccggtttgtcaccggcagtctccttagagtgcccacccgaggtgctggtaactaaggacaagggttgcgctcgttacgggacttaacccaacatctcacgacacgagctgacgacagccatgcagcacctgtgtctgagttcccgaaggcaccaatccatctctggaaagttctcagcatgtcaaggccaggtaaggttcttcgcgttgcttcgaattaaaccacatgctccaccgcttgtgcgggcccccgtcaattcatttgagttttaaccttgcggccgtactccccaggcggtcgacttatcgcgttagctgcgccactaagatctcaaggatcccaacggctagtcgacatcgtttacggcgtggactaccagggtatctaatcctgtttgctccccacgctttcgcacctcagtgtcagtatcagtccaggtggtcgccttcgccactggtgttccttcctatatctacgcatttcaccgctacacaggaaattccaccaccctctaccgtactctagctcagtagttttggatgcagttcccaggttgagcccggggatttcacatccaacttgctgaaccacctacgcgcgctttacgcccagtaattccgattaacgcttgcacccttcgtattaccgcggctgctggcacgaagttagccggtgcttattctgttggtaacgtcaaaacagcaaggtattaacttactgcccttcctcccaacttaaagtgctttacaatccgaagaccttcttcacacacgcggcatggctggatcaggctttcgcccattgtccaatattccccactgctgcctcccgtaggagtctggaccgtgtctcagttccagtgtgactgatcatcctctcagaccagttacggatcgtcgccttggtaggcctttaccccaccaactagctaatccgacctaggctcatctgatagcgtgaggtccgaagatcccccactttctccctcaggacgtatgcggtattagcgcccgtttccggacgttatcccccactaccaggcagattcctaggcattactcacccgtccgccgctgaatccaggagcaagctcccttcatccgctcgacttgcatgtgttaggcctgccgccagcgttcaatctgagccatgatcaaactcttcagttcaatactgcttgggttttgagaaaaccctaaacttggctcagcaatcgcattctcttaaaaagagataaaactctcgaattcacgagtgttacttgcgttgctgataatcttgcgatcaccagtcttacatcacaagcacccacacgaattgcttgattcgacttgttaaagagcagttggtcaaggctttcgtctcaaccgaggccgcgcattctacagcaacctctctttccgtcaagcgttattttcgaaaattttcttttctactcaaccgcttgcgccgaccttcaaaccatcttccgatcagcgggaggcgcattctacagcgttcaaattcgctgtcaagcacctcgatgaagcttcgtttcgaatccctttcgggaccgaaccgctgcggcgaacaacctgccggagcgcttcaccacccctgggagagaatccgtaaatccttgattttcaagcatttactcttcgtcgtcgccgggagtggtgcgcattatagggagatagaaactggcgtcaacgattatttcaaaaataattcaaataaccgccggaagcgctttcagcccaccgaaaccgcctcgccagccggctttttctgcgccagcaggtagagcccgacgaggaagccgaccaggcacagagtgaccacgtagtaagccggccccatcgggctctgcttgagcagcagggccaccgccatcggcgtcagcccaccgaagatggcgtaggccaggttgtaggaaaaggacaggccggagaaacgcacaaccggtgggaacgcattgaccatcacgtagggaacggcgccgacgatgccgacgaagaagccggtcagtgcatataaaggaaagagccagtccgggtgggccttgaggttgccgtagaagctccaggacaccagcgccagcagcacgctaccggcaacgaaagtcagccccgcgccgtaacgatccgccatgcgcccggcgacgatgcagccaagggtcaggcagacgatcgccaggctgttggccttgagcgccgtggcggcatcgaagccgtatacgctctgcagcacggtaggggtcatcaggatgaccaccacgatcgcggccgacagcacccaggtcagcagcatcgacaccaggacggcgccacgatgatcgcggaccaccgctttcaacggcacttcctctgccagcgccttgcgctgctgcagctcggcgaataccggcgtctcgtgcagccagcggcgcaggtagaccgagaacaggccgaacaccccgccgagcaggaagggaatccgccaggcgtagtcctgcacctctgtcgcgctatagaagctattgatcgcagtagccaccagcgagcccagcaggatgcccgccgtcaggccggaagtcagcgtcccgcaggcataaccgacatgccgtgccggtacatgctcggcgacgaagacccaagcccccggcacctccccgccaatcgcggcgccctggatcaccctcagcaggagcagcgccaggggcgcccagatgccgatctgcgcgtaggtcggaagcaggcccatgatcagggtcggcaccgccatcatgaagatgctcagggtgaacatgcgcttgcgcccgagcaggtcgccgaagtgggccatgatcacgccgcccagcggccgcgccaggtagccggcggcgaacaggccgaaggtttgcaactgacgcagccattccggcatgtccgccgggaagaacagcttgccgaccacggtggcgaagaacacgaagatgatgaagtcgtagaactccagcgctccacccagggcggagagggacagggtcttgtagtcgctgcgggtcaatggacgctgggccggcgcctcgggagcattcgcggatggcatgtcgggattgttctctttattcgttcagcaagcatgagcggggttcgaccggcaggcgtgtcgacctgcgacccggggacgcaggagcgaaaccatagcaaatcgacgaatgtccacacagtcggtcgaagagagaaccgggcggtcgtcggctgccctactcctctatataatgcccgggcgcctctgaaagctgtcccaagaccttgcaccggcaggcgttttgggagagttttcccctaaaccgcgcttgaacaagaaatccggggggcacgaggcccttacctatgatcgagcttgaacaagaagaccccattccccagggagacctggccttgcagattaccgcgctgccgcgcgaaaccaacggtttcggcgatatctacggcggttggctggtatcccagatggacctggcgggaaccgccatggccagcaagatcgccggcggccgtatcgccaccgtcgccatcgaccgcatggccttcatggtgccggtcgcggtaggtgcccagctttccttctatacccagaccctggaagtcggccgcagctcgatccgcatgctggtcgaggtgtggagcgacgacccgctgtccagcgaatggcgcaaagtcaccgaggcggtgttcgtgttcgtcgccatcgatggcagcgggcgcacccgcccggtcccgccacgccggggctagacgcaggaacgccggctatcgccggcgttcttgtttgcgcgttcctcaggcccgcacggggttgccgcgtaccggcgcatccccggccacgtagtacttcaccgtgctgcgcggcagcggctggcgaccgcggatcctgtcggcgatcttctcggccatcatgatggtggtggcattgaggttgccggtgatgatcagcggcatgatcgacgcatccaccactcgcagtccttccatgccatggacccgtccctggccatcgaccaccgccatgtcgtcgctgcccatcttgcacgagcaggatgggtggaaagcggtctcagcatggttgcggatgaactcgtcgagttcggcgtccgactgcacgctcaccccagggctcaactcgcggccccgataggggtccagcgccggctggttcatgatctcgcgggtcagccggatgccgtcgcggaactcctgccagtcctgctcgtgggacatgtagttgaacaggatgctcggatgctggcgcgggtccctggatttcaggtggatgcgcccgcggctcggcgagcgcatcgagcccatgtgcgcctggaagccgtgctcctgcacgcccttgctgccattgtagttgatcgccaccgggaggaaatggaactggatgttcggccattcgaacgcttcgcgggttcggatgaagccgccagcctcgaactggttgctggcgccgaggcccttgccgaggaacagccactgggcaccgatggcaggctggttccaccatttggtcgccgggtagatcgacaccggctgcttgcaggcgtactgcaggtagagttccaggtgatcctgcaggttggcgccgacgcccggcaggtcatgcaccaccgggatgtccaggtcgcgcagcagggccgccgggccgacgccggagcgttgcagcaattgcggcgaggcgatcgcgccgctgcacaccaatacttcgcggcgggcgtgggcggtgaccgggttgtcgccgttgcccaccaggtaggagacgccgatggcgcgcttgccgctgaacaggatgcggtcgctcagggcgtgggtgacgatggtcaggttgggccggccgcgggcctggtccaggtagccgcgcccggtggcggcgcgacggccctccggggtgacggtccggtccatggggccgaagccttcctgctggtaaccgttgaggtcatcggttcgcgggtagccggcctgcacgccggcctcgaccatcgcatggaacagtgggttgttgccggccttcggcgtggtcacgctgaccgggccgtcgccgccatggtagtcgttggggccgatgtcccgggtttccgccttgcggaagtacggcaggcagtcgaggtagctccagtcctcgaggcccggctccttggcccagccgtcgaagtccagggcgttgccgcggatgtagcacatgccgttgatcagcgaggagccgcccaggcccttgccgcgaccgcactccatgcggcggttgttcatgtagggctcggggtcggtctcgtaggcccagttgtagcgccgcccctgcagcgggaaggcaagggccgccggcatctgggtgcggaagtcgaagcggtagtcgggaccgccggcttcgagcagcaggacgctgacgtcggcatcttcggtgaggcgggtagcgagtacgttaccggcagagccggctccgatgatgatgtagtcgaattcctgggacatgcaggccttcctcttttctcggcatgacaccggccgcgacgctggcgcgccggtgtctggaagttcggaatggccggtgtcagggagcgttgcctgggaccggcctggttaggggttcgagcgctgcgtcgaggctcagaacaccgaggcgtagtcgcccagctccacttgcacggacttgatgcgagtgtaatgagccagggtagtgagaccgttctcgcgaccgacaccggattgcttgtaaccgccgaccggcatttccgccggcgactcgccccaggtattgatccagcagatgccggcttccaggcgatggatggcgcggtgggcgcgggccaggtcctgggtcacgacgccggcggcgaggccgtactcggtatcgttggcgcggcggatcgcctcgtcttcgtcgtcatagaccaggatgctcatcaccgggccgaagatttcctcgcggacgatggtcatgtcgtcgcggcaatcggtgaacacggtcggcgcgacgtaggcgccattgccgaacgctccatcggtcacacgctcgccgccgcacagcaggcgagccttctgcgccttgccggactcgatgtagccgagcacgctttccatgtgcgggaagctgaccagcgggccgaagttggtgttctcgtcctgcgggtcgccgagacggatgcgctgcacgcgctccagtaccttggcttcgaagcgggcctgctgggaacggtggatgaacacccgggtgccgttggtgcagacctggccggagctgaagaagttggccatgacggcgatgtcggcggcacggtcgaggtctgcgtcggggaagatgatcagcggggacttgccgcccagctccatggtcacttccttcagcgacgagctggaagcgctggccatgactttcttgccggtggaggtgccaccggtgaaggagatcttctcgatcagcgggtgctcggtcagccactggccgacttcgcgtccgctgccggtgagcacgttgaacacgccgtccggcacgccggcctcggtgtagatctcggccagcttgagggcggtcagcggggtgacttcgctgggcttgaagatcatcgcgttgccggcagcgagggccggggcggatttccacagggcgatctgcaccgggtagttccaggcgccaatgccggcgaccacgcccagcggctcgcggcgggtgtagacgaagctggtttcgcgcaggggaatctgctcgccttcgatggccgggaccaggccggcgtagtactcgagcacgtcggcgccggtgacgatgtccaccgagcgggtttccgccagcggcttgccggtatccagggtttccagggcagccagttcgtcgttgcgctcgcggaggatgtcgacggcgcgacggaggatgcgcgagcgctgcatggcggtcatcgccgcccacaccttctgcccctcgacggcgctctgcacggcccgctcgacgtcttccctggaagcccgctggaccttggcgagcacttcgccgttggccgggttgatggtctcgaaggtggcgccactgctggcctccacgtagcgaccgccaatgtagagcttctgttcttcgaatcgggccatgttgcagtcctctcttatcggtatcgcaggcgcaaggcggcgccgcgggggttttcgtccctaccccgactgttttgccaactgctggtcgaggtagtcgtaagcgatgttcaaggcctcgtcggtatcgaaggcgtcgccggtcagcgcgccacgcaaccacaggccgtcgatcagggccgccaggccgcgtgccgcggcgcgggcgtcgtccgccgagagctggcggcggaactggtagcacaggttcgaatacaggcgatggtcgttgacccgctgcaatcgacgcagtgccggctggtgcatgctggtcgcccagaacgccagccaggtcttcatcgccggaccattgacctggctgtcgtcgaagttgccttcgacgatcgctcgcaggtgcgccctcggactgtcgtcgtagagcgccgcgcggcgttcgcgtacggccttgctcaaggcgctgagcaggtgccgcatggtcgcttccagcaagccgttcttgtcctggaagtagtggctgatgatgccgttggaaacacccgccaggcgggctatcagggcgatgctggcgtctcccatgccgacctgatcgaccgcctccagggtggcgtgaatcagttgcgagcggcggatgggctgcataccgaccttgggcattgctatctcctctcgtcgatgggtgcgtgcgggcaccgaccgacgtcattggtggccagtctattttgtttttattgaacgttcaatcaactaagaataagctcggcgtccatgagcggctcccagcctgcgtgcaacctggcccgcgccgttcatcacctcgtcgccgaagtccgccaaggatcgcagaatccgggcttcaagtggggtggcaatgctgtgtctgtagtccgcggccataagccgccatgctttcactgccatggggtcatcctccaatgagtactgcttcgccaataaaaacaaacgagcaggtacgtctgaatccgatcgtgttcttcggctcgaccgcactgatcctggttctgaccgccgccctcatcctctatcccgacagcgccggagccttgctcggccgcatccaggcgtggctgtcgcacagcttcggctggtactacatgctggccatcggcgcctacctgttcttcgtcgcctgggtggccttctcgcgcttcggcaccctcaagctcggcgaggagcatgaaaagccggacttcagctacggcgcctgggccggcatgctgttctcctccgggatcggcatctcgctgctctacttcgccgcatccgagccgatcgaccacctctaccatccacccgaaggcgttcccggcagccctcaggcggcgcgccaggcgctgcaactgaccttcctccactggggcctgcacggttgggcgatctatgccctggtcggcctcgccgtcggttatttcgcctaccgccatagccagccgctggcgttgcgctcggcgctctatccgatcctcggcgagcgctgggtgaaaggcgccgcgggccacgcggtggattgcttcggcatcttcgtcacccttctcgggctggtgaccaacctgggcatcggcgccttgcaggtgtcgtccggtctcgagtacctgaccggcatgccgcacagcaaaggcaccctgctggcggtgatcctggcgatgagcctggtcgccaccctggcggcggtctccggtgtcaagaaaggcatccgccggctgtccaacctgaatatcgtgctgttcagctcgctgctgctgttcgtgctggtctgcggttcgaccctggaactgctcaacggcttcgtacagaacctcggcgactatctcgacggcctggtgctgaagaccttcgacctctacgtctacaccggtgccggcgccggcaagagcgaggaatggctgggcctgtggaccctgttctactgggcctggtggatttcctgggcgcccttcgtcggtatgttcatcgcccgcatctcccgcggtcgcagcgtgcgcgaactggtctgcggggtgctgctgatcccgctgggcttcaccctggcctggctgtcggtattcggcaacagcgccctggacctggtgatgaaccacggcgcgaccgacctgggcaaggccgcgctggaacagccgtcgatgtcgatctacctgctgctggaacactatccgctgtcgaagatcgtcatcggcctgtcgatcttcgtcggcttcgtgctgttcctcaccccggcggattccggctcggtgatgctggccaatctctcgcgcagcggcggcgagctggacgaggacgcgccgaactggctgcgtatcctctggtcggccgtcgtcacgctagtcaccatcggcctgctgttcgccggcaacttcacggcaatgcaaaccgtcgtggtgctcgccgggctgccgttctcggcggtgctgatcctgttcatgttcggcctgcacaaggccatgcgcgccgactacgaggcccaggtcggcgaccgccgcacctaccagccggtgccggcgccaacccagccccagacctgaacccggcgccgctagggcgccctcgccaatcaggtgcgtacttggcccggcgtttcgccgggcctttcttttctgccacccggcgcccggcgcatgccgcaggaaccggcgcgcaggagcgtgcgaaaggaagaacagacggaaaaagcgcggaggataaacgcgaatgcccggcagcgccgggcattcgtagcggccccgagcgggccgagggggatcagccgaggttcttgcccagcaacgcgtggtacagctcgctgtcgccgagcaccccgaccaccctgtcctgctcctgcaggaccagcttgtggccggtctggtagcgaatctgcagggcatcgcgcatacggatgctgacatccaccagggtcggttcgcggcgcagcttctccaccgggtcgccctggcgccagcgttgcaggtcgatgacgttgctgccctggcgcgcgcccttgagcacgtcgccttcgctgagaccgatccagcagtcgcggccctggtcgaagcagatctcgtcgttctgccggatgcactggtcgaggccacgcatcaggctctggccgcacagcacgttgagcgggttggtatgggcgacgaaggtacgcacgtagtcgtccgcggggctcagcacgatctcttccggcttgccgtgctggatgatccggccgtccttcatgatcgcgatgcgggtgccgatcttcagcgcctcgtcgaggtcgtggctgacgaacacgatggtcttgtgcagttgccgttgcagcaccagcagttcgtcctgcaattgctggcggatcagcgggtcgagggccgagaacggttcgtccatcagcaggatgtcgccatccatcgccagcgcgcgagccaggccgacgcgctgctgcatgccgccggagagcgagtcgggacgcttgtcgcgccactgcgagagaccgaccagctcgagcttctcgtcgatcagcttcttccgctcggcggccgggcggccctgcatctccaggccgaagccgacgttctcggccaccgtcagccagggcatcagggcgaacttctggaacaccatggcgatgcgcttggtacgcatggccttgagggtcgccggcgagcagttggcgatgtccacctgcgaaccttcgtgctcgatcagcagcttgccgcggctgaccttgttcaggccgttgatgcagcgcagcaggctcgacttgccggagccggaaagtcccatcagcacgcagatctcgccgcggttgacgtccaggcaggcgtcctcgacgccgagcacctggccggtgcgcttgaggatctcggcgcggccgaggccctggtcgaggagcttcagggcttccttggtgtgggtgccgaagatgacgtccacatggtcgaatcggatcgcggtcatggcttatttccccttcacggcgcgctgcttgcacacccggtcgagcaggatggcgagcaggacgatggccaggccggcttcgaagccgagggagatgtcggcggtgttcagcgcgttcaccaccggcttgccgaggccatcggcgccgaccagcgcggcgatcaccaccatcgacagggagagcatgatgcattgggtgatgccggcggcaatgctcggcatcgcgtgcggcagctcgatgcgcgtcagcagttgccagcgcgagcagccgaaggccttgccggcgtcgagcagctccgccggaacgtcctggatacccaggcaggtcaggcggattggcgcggcgacggcgaagatcaccgtggagatcaggcccggcaccacgccgaggccgaacagggtcagggtcgggatcaggtagacgaaggtcggcaccgtctgcatcaggtccagcagcggccgcagcgcggtgtagaaccacggcttgtgcgcggcgacgatgcccagcggcacgcctacggcgatgcacaccagggtggcgaatatcacctgggcgagggtttccatggtctcctgccagtagcccaggttgaggatcagcagcaacgaggccagggcgaacacggtcagcccccagctgcgctggatgaaatgcaccagccctaccagcaaggcgatcagcaccagcgggttgaaccagagcaagccgttggtgacgccatggatgaggaactcaagggtgtcggagatcttgtcgaagaacgatgcgccatgcagggtcagccagtcgacgaaaccggcgatctgctctcccagcgggagcttgtgatcagtcaggaacataatcagggtccatcaagagcgggaaatgaacgaccggtcgcctacttggcgaacgccagcttggccgcggctgcggcaggctgcccgtcgcgggtggtgacaccggccagccaggcatccagctgttccgggtgatccttcaaccaggccttagcggcttcctcgggtttcttgttttcgttgagtaccgcgtccatcagcttgttctccatctcgagggtgaagctgaggttcttcagcagttggccgacgttggcgcactcctgggcgtagcccttgcgcacgttggtgtagatggtcgcgccgccatagttggggccgaagaagtcgtcgccgccttccaggtacttcatctggaagcgggtattcatggggtgcggctcccagccgaggaacaccacccactggttgcgccggatggcccgctgcacctgcgagagcatgcccgcctcgctggattccaccaacttgaacttgcccagttcgaaggcgttcttgtcgatcatgctctgggcgacgcggttgccgtcgttgcccggctcgatgccgtagatcttgttgcccagcttgtcggagaacttcgcgatatcggcgaagctgcgcaggccgccgtcgtagacgtactggggaaccgccagggtgtacttggcgccctccaggttggcgcgcagtgtctcgaccgtacctttctcggcgtactgcttgatgtcgttggtcatggtgggcatccagttgcccaggaatacgtcgaggtcgttgttggccagggagcggtaggtcaccggcaccgagagcagattgaccttggtcttgtagccgagggactcgaggacctggcgggtgaccgcagtggtcactgtgatgtcggtccagccgacgtcggcgaaacgcaccgacgcacaggattcgggctccgcggcctgggctgccagcggtgcgcacagagacacggccagcagccaagacttgcaacctttcatagcgaactcctctgcagggtaaggcgccggcgctaccccgaagggcgcggcggtctgtctgtatcgggccgaccggtagcggccctcagcgggcaattcgtgaacgatcatgaaacaggacgcatccgtcgcctacagggtgggtcgcaaccagtgcaggcggggtcgcattcagtacccgctgtgtcgcattcaatcatagtggtctttgccggcgaccagcggatgccgttttcggagcggcgcgagcccgttctcattccgacgccgtgcaggtgcagacgcccctcggccgcagaggttccccgatccgggcgcggacgcggcgcttttggacatggccgggtcggtggcggatgcggcccgccccggggaaagcccgatgatgcgcaggaatcgcgggcggaggagccgccacccccactacgcaggcacggatgccgcggcaatcccggaggccggcatggctatcagtgtgttcgaccttttcaagatcggtatcggcccgtccagttcgcataccgtcggccccatgcgcgccgccgcgctgttcaccgctgccctgcgccagcgccaggcgctgtcggcggtgcggcgtctcgaagtgcgcctgtatggctcgctgtccgccaccggcgtcggccacggcaccgatcgcgcggtgatcatgggcctgatgggcgaatggccggatcgtatcgacccgacccagatcgccccacgcatggccgccctgctcgatagcggcctgctgcaactggacggccgcgtggcggtaccgttcgactgggtgcgcgacatgcgcctgctcgacgagaacctgccctaccaccccaacgccatgaccctggtcgcctacggcgagcaaggcgaactgcaccaggagacctactactcggtgggtggcggcttcgtggtcgatgcggcacaggccgcctcgggacagctcgaccaggaccacacggtgctgccctacgacttctccagcgccgaggaactgttgctgctgtgcaagcgccacaacctgcgggtatccgagctgatgctggccaacgaacgcatctggcgcagcgagaccgacatccgcgaaggcctgcggcgcatctggcaggcgatgcgcgattgcgtcgacaacgggttgcgcaacgaaggcatccttcccggcgggctcaacgtgcaacgccgcgccgcgcgcctgcaccgcaacctgcaggagatcggcaagcccaacgtgatcggctcgaccctcagcgccatggaatgggtcaacctgttcgccctggcggtgaacgaggagaacgccgccggcgggcgcatggtcaccgcgcccaccaacggcgcggcggggatcatcccggcggtgctgcactactatatgaagttcaatcccgacgcccaggaccgcgacgtcgtcgactacctgctggccgccgccgcggtgggcatcctgtgcaagaagaacgcctcgatctccggcgccgaggtcggctgccagggcgaggtcggctcggcctgcgcgatggccgccgccggactggcggaagtcctcggcgccaccccggcgcaggtcgagaacgccgccgagatcggcctggagcacaacctcgggctgacctgcgacccggtcggcgggctggtccaggtgccctgtatcgagcgcaacgcgatcgccgcggtgaaggccatcaacgcggcgcaaatggccttgcgcggcgacggccagcatttcatctcgctggacaaggtgatccgcaccatgcgcgacaccggtgccgacatgcacgacaagtacaaggaaacctcgcgcgggggcctggcggtgaacgccatcgagtgctgaaccggaattgctcacgaaacgatcgagacgccactttttggcgcatatgacgcgtgaccgggcggtcgtcatccgtcacactgcggagtaacggctcgccgcccgtcgttacctttgtcgccacggccgctgccccgccttctcgccgggggccgccctggtgctaccgaaatgcccaggcgcgcggcgcgccgccagccgtcgcccatgctgtcgttgtgccaggtccgaggggaaataccgggctaaagccttccggcttttttgattgaacgcccaatcaatataggcatggcatttgccttgctctggttacaagcaacgccgacggcgtggcccaagcagccacccggaaattccaacaatcataaaaaaagcctcgtgagaggcctgcttgctcagcgtgaggagatacacccatgaccacgtacgcgcccggagtcccaccacagaaccgaaatccgcagtccatcggcttcctgctgctggacaacttcaccctgatctccctggcctcggcggtggaaccgttgcgcatggccaaccagctctcgggacgcgaactctaccgctggcatacgctgagcctggacggccgccaggtctgggccagcgacggcctgcagatcacccccgacgccggtaccgacaacgccccggcggtggattgcgtgatcgtctgcggcggcgtcggcatccagcgcagcgtcacccgcgagcacgtcactttcctccaggcccaggcccgccagggtcggcgcctcggcgcggtgtgcaccggcagttgggcgctggcccgcgccggcctgctcgacggctacgattgcagcgtgcactgggaatgcctggcggcgatgcaggaagccttcccccgggtggccatgagcacccgcctgttctccatcgaccgcaaccgcttcacctcttccggcggcaccgcgccgatggacatgatgctgcacctgatcggccgcgagcatggccgcgagctgtcggcggcgatctccgagatgttcatctacgagcgcatccgcaacgagcaggaccaccagcgcgtgccgctcaagcacatgctcggcaccaaccagccgaagttgcaggagatcgtcgcgctgatggaggccaacctggaggaaccgatcgacctcgacgaactggcggtctacgtcaacgtctcgcgtcgccagctcgagcggctgttccagaagtacctgcactgctcgccgtcgcgctactacctgaagctgcgcctgatccgcgcccgccagttgctcaagcagacgtccatgtcgatcatcgaggtggcctcggtctgcggcttcgtctccaccccgcacttctccaagtgctaccgcgagtacttcggcatcccgccgcgcgacgagcgccagggccagccgctgggccagccggtggtgctgatgccgatcccgcaggacctggcgttgatgcccaactcctcggcgctgtcggccctgagccaggcgcagggcgagtcgaccttcgccagcgtgcggatctgacggcgcgtccctgcccgccccgtccacgggagcgggcagggccttgtcagccccgcggcaccagcgccggcagcaattgccgggaaatcgcctcgcgcaccgccgggagcagcgtggcgtgcccgccgagcatgtcctccaccagccgccgcagcgcctgggcgcgctccgggctgaggccgcgcacggcgtattcgcaggcctgctccggagtcgagtccggcggcacgctgaagcccagcgcctgcaggcgttcgcggaaatcgtcctggtcgatcagatcggcgtgcatcatcgcggcagctccttcgatggggattgccatcgattctgctgagcccacgtcgctcccggcaagggggctgtcccgcctggacatgggcaggtcgttttcggctaattcgaccgccagcgacaccgccacaatcgcctccagcggcttgcggaatgcagcggacggcttccggaaaacgccagactcacactgagggccgttcctggctcctttttcatccccctccgcgcgtcgggcgcggcagggggatttttttgccggaagccagctagccggcgccgagtcccgcccgacagtgttcccagaaacgctcgaagcccggcgagaggaacttgtcgcgctggcgcagcatgtagaagcgccggcgcaacggcggcaggctgctgcgcagttcgaccagcgcgccggaggccaactgttcctcgaccacccagcgcgacaggcaactgatgcccagcccggcggcgacgctgtgcttgatcgcctcggagctgcccaggtccaggctgtcttccaggtaatgcaggtggcccagcagggcgtggctgacctcctcgcgcgtgcccgagccgggctcgcgcagcagccagcgcgcgcggcgcagggcctcgcgggagacctgggtgcgcaaggccagcgggtggccgggcgccgccaccacgatcaggctgtcctcgagccagggctccacccgcaggcccggctcgtggcaggggccttcgatgaggccgatgtccgccgcgaaggtcaccacgtcctgcaccgccgaaccggtgttgccgatgctggcgttgaccctcacccccggctgctcccgctcgaaggaggccagcaggcgtggcagcacgtagttgccgatggtgctgctggccgccaccgtcaggctcgcctggggcgcggcggaaaccgcgaactgctgctccagttgcgccaccccgtcgagcaggcgcaatgcctggggcaggaagcggcggccgacctcgttcagttgcaggcgcttgccgacccggtcgaacaggcgcgtggaaagctgcgactccagctcgttgagcgcagcgctggtggccgactgcgacagcgagatggattccgccgccgccgtggtactgccgcagcgagccaccgcacagaagatctggagctgacggaaactgagggccatggactcacctacctgtttttcaggtatttaatacagaaactattcgtttcacaaattcatgcccgctacctaacctgcgtcccgtgacctcacctgaggagcgaaggatgcacaccctccccgtcaagaccggtaccagacccctggcccaggtccagaaactcatccccggcctgctgctcagcgccgccctggccggcgcggcgatcctcctgggtcgttcgcaatggttgcagcacaacggcatcagcgcgctgaccctggccatcgtgctcggcatcgtcgtcggcaacaccctgtaccctcggatcgccgccggcagcgccgccggcgtcggcttctccaagcagatcctgctgcgcgccgggatcatcctctacggcctgcgcctgaccttccaggacatcgccggcgtcggattgcacggcgtgctgctggacgccctgatgctcgccagcaccttcggcctggcgtgcctgctcggcacccggctgttcggcctggaccgcaccaccaccctgctgatcggcgccggcagttcgatctgcggcgccgccgcggtgatggccaccgagccggtggtgcgcggccgtgccgaacaggtcgcggtggcggtctccaccgtggtggtgttcggcaccctgggcatcttcctctatccggcgctgttccagctcgaccaggactgggggctgctgccgcgcgaccctggcacctggggcgtgtacatcggtgccacggtgcacgaggtggcccaggtggtcgccgcgggtcgttcgatcggcatcgaggcagcggataccgcggtgatcgccaagatggtccgggtaatgatgttggcgcccttcctgatcctgctctcggcctggctggcacgcgacaaggcgcaccgccggcagcacagcggcgcgaccaagatcaccattccctggttcgccgtcggcttcgtactggtcgccgggctcaactcgctggtcagcctgccgccggcgctggtcagccacgtcaacgacctcgacaccttcctcctggccatggcaatggccggcctcggcctcggcacgcacctctcggcgatccgccgcgccggcctcaagccgctgctgctggccgccctgctattcgcctggctggtgctcggcggtggattactcacccgcctggcgctcgcctgagtcctccgccaggaagccctgcacggcccgccgcaaggcctcgtgcagggcttccacctcatcgatgccgtggccgcgcaggcagccatggaccagcccgcttcccggatagaaccctgcctcgccacccgccgcgcgtagcgctgcgccatagcgctcgccgtcgtcgcgcagcggatcgaattcggcaaccgccacgaaggccggcggcaggccagtgaaatcagcggcctccaggggtagcgccagcggctgtcggtgcagcgccgccagcggcaggtaggcgtccaggcacgcctgcacatcgccgaggccgagcaacggcgcgtcggcgcagtcgatccgcgagggcgatggcgcagcggacagcaagggatagagcaatatctgcgcggccggcgacggcgcgccgctatcgcgcagggccaggcacagcgccgccgccaggttgccgccggcgctgtcgccggccaccagcaggcgtcgcccatccagcgcttcgtccagctcgcccaggctcagcgcctgccaggcacgcaggcaatcctgcaatgccgccgggaacggatgctccggcgccagtcggtaatccaccgccagcaccagcaggcccaggcgcgccgccaggtcggcgcagatgaaatcgtgtgaatcgaggccgccgagcatccagccgccaccgtgcaggtagagcagcgccggccagccaccgggcggtgccgggcggtcggggcgatagcggcgcacgcgcaccggcggcgcggccggcaagcaggagtcgagcacccgcaaaccggccgggcgcggcggcgcgaacgcctggcacatccgcgcgtaggccgcacgttgcgcatccaggcgcggactgtcgctggcgaacgcccggctgtgctcgacgaagcgccacatcgccggagacagcggatacttcgcagccatcgcgctcagcgcaccggcggcaggccgatcacccgaccgacaccttccggcacggggagcgcgcgatgtgcctcggcgagcgcctcgacccgcgccagcacctcgccttcgaacggtaccgagcgcgggccgtcgaggctgacgtggagcagcatctgctcgctcagcgccagcgcctgcccgctgccaggcaggtacagggcatggtggatatgcaggcgcttgcgatcgtgaccgagcagttgcgtacgcacctcgaccctggcgccctccttcacctcatggaggaagttcaggtggcattccagggtgaacagcgagtgtccgctggcgtcgcggttctggctgtccaggccgatatgcgccatcagcgcatcggtggcgtagctgaacaccagcaggtagaacgcatcgcgcaagtggccgttgtagtccacccactcgggcaggaccggcgtctcgtaggtcgtcaggacttggctcatggcaggctccgtggttgctctacgtccggcggggcggaaggcgcgtcatgtcactcggcgaaggcgaagccgtgccgggccttggtttccctgatcgccccgagcaccgccagcaggcagtcgtcgcggtagcgctcgagctcggcgatgctgcgcgcgccctgctgctcggcggtgccctccaccacccggtcgatcagggcttcggtgagttccggcgccggcaggtaggtccagggcaattgcagcgccgggccgaactgcgccatgaagtggcgcatgccggcgttgccaccggccagggtgtaggtcaggaaggtgcccatgaacgaccagcgcaggccggcgccgaagcggatcgcatcgtcgatctcgccggtcgtggccacgccgtcgttgaccaggtgcagcgcctcgcgccagagcgcctcgagcaagcggtcggcgatgaagccgggcacttccttgcgtacgtgcagcggacgcatgcccagcgattcgtagacccgcatcgccgcccgcacggcctcggcagcggtgcgttcgccgccgaccacctccaccagcggcagcaggtagaccgggttgaacgggtggccgaccaggcagcgctcggggtggctcgcctcggcgtagaactcgctgggcagcaggcccgaggtggaggaaccgatcagcacgtcgggccgcaccgcggcgctgatcctggcgtgcaggtcgagcttcaggtcgagccgctcgggggcgctctcctggatgaaatcggcgtcgcccacgcattcctcgatgctcgcgacgaagcgcaggcgctcctgcgccgcgccgggcgccaggccctgtttccgcaaggccggccaggcattggcgacgcgcgcgcgcaacgccgcttcggcgcccggcgccggatcccaggcgacgacgtcgaggccgtgggccagggcgcgggcgatccagccgctgccgatgacgccgctaccgagggcggcgaaggtcttgatctcggtgacgaaggacatggacatctccagaggttgttcccgcccccgacggggcggggaggaagaaatcagcgcggcttcaggttcatcctgcggcgcccttccgccgggctcagggcgcgcccgccgaggcgctcgatgatctcgatggcgcgctccaccaggctgccgttgctcgccggcacgcccttgtccagccagatgttgtcctccaggccgacccgcacgttgccgcccagcaacatggcctgagcgaccatcggcatctgcgtgcggccgatgccgaagccggcccaggtcgcccccggcggcaggttgtcggccatcgccttcatggtcgtggtatcggccggcgcgccccagggaatgcccaggcagatctggaacagcggatcctccagcagcccttccttgagcatctgcttggcgaaccagaggtggccggtatcgaagatttccagctcggccttgacccccagctcggtgatgcgccgggcgccggcgcgcagttgcgcaggggtggagacgtagatgtagtcgccgtcgccgaaattgagggtgccgcagtccagggtgcagatttccggcagcagctcctcgacatgcctgagccgctccagcgggccaaccaggtcggtgccggcaccgaactccaggggctgctcgcccttgccgatttccagatcgccgcccatgccggcggtgaggttgatgatcacgtcggtgtcgctttcgcggatacgctcgaccacttcacggtacagcgccacgtcgcgactgggcttgccggtggcggggtcgcggacatggcagtgggcgacggtggcgccggccctggccgcctcgatggcggcctcggcaatctgtttcggggtgaccgggatcgccggatgccggccgacggtatcgccggcgccggtcaccgcgcaggtgacgatgacttcatggttcacggtggtagcttcctgtattcggggtgtacgaagccccgcccggccgcgccgggcggaacggataggtgcgggttacttcagcgaggcctggagcgcggccaggccgtccttgccgtcgaaggtgctcacgccatccagccaggccttcagcggctcggggttggccttcagccactggcgcgcggcgtcgaggggctgggtgcgatcgaggatgggcgccatcacctggctgatctgggcgctgctgaagcgcaggttgtgcagcagccgggcgacgttgccgcactgagcctggtagccggcggcggtcatggtggagacggtggccgcgccttcgtcgggaccgaacacatcctcgctgccggtgaggtaggtcatgtcgatctgcaggttcatcggatgcggcttccagccgaagaacaccacccactgcttgcgcttgatcgcccgcttcaccgccgtgagcatcccggcctcgctggactccaccagctggaagctcttcaggccgaaacggttgtcgtcgatcatcttccgggtgatgcggttcgagccgctgcccggctcgatggcgtagatgcggccgccaagcttgtccttgaagcgggcgatgtcggcgaaggtcttcagcccaccctcggcgacgtagctcggcaccgcataggtggactgcgcgtcggccagggtcggcggctcgatcacttcgatccggcctttgtccaggtaaggcctggcgaccggctgcatggtcggttgccagtagccgaggaacaggtccagctgcttgtctgccaggccggccaggacgatctgttgcgaggcgctggtctgcttcacctggtagcccaggccgtcgagcaaggcttcggccacggcgctgctggcgaccacgtcggtccagttcaccgtgcccaggcgcaccgtgcggcactgctcgggttcggcggccagggcggcgccactggccaggatcagcagggcgcagcccagctggcgaatcgtcgtcttcatcggtctcccctcgtgcggctattgattgtttttctgcgaggtgggcgccggccccttgcgagaccgaccctggcgaccaaggtacgcagccgggacggcggcgaagcgcactgcggcgaccagctcttgcactgcagcgacctggccattgccaagcgcggcgggcctgcgctacacacaggctgcgcaacctcaaccccggagcgccccatgtcccaggacttctggtttctcctgctgcccggcttctcggtaatgggcttcgtttccgccgtggagccactgcgcgtggccaaccgcttccacgccgacctctaccgctggcacgtgctcagcgccgacggcggtccggtgctggccagcaatggcatgtcggtgaacagcgacggcgcgctggagccgttgaagaaaggcgacctgctgttcgtggtggccggcttcgagccgctgcgggcggtcaccccggcactggtgcagtggctgcgcaagctcgaccgcaacggcgtgaccctcggtggcatcgataccggcagcgtggtgctggccgaggccggtctgctcgacgggcgccgcgcgaccctgcactgggaagccatcgacgccttccaggagtcctacccgcaactgagcgtgacccaggagctgttcgagatcgacgggccgcgcatcacctcggccggcggcaccgcctccatcgacctgatgctcgacctgatcgcccaggcccacggtccgcaactggcggtgcaggtttccgagcagttcgtgctcggccgcatccgcccgcgccaggaccaccagcgcctgcaggtggcgacccgctatggcgtgagcaaccgcaagctggtgcaggtgatcggcgagatggagcggcataccgagccgccactgaccaccctggagctggccgagcgcatccaggtcacccgccgccagctggaacggctgttccgcgtgcacctggacgacacgccctcgaacttctacctcggcctgcgcctggacaaggcccgccagttgctgcgccagaccgacctcagcgtgctacaggtgagcctggcctgcggcttcgagtcgccgtcgtacttctcccgcagctaccgcgcgcgcttcgccgccagtcccagccaggaccgcgcggtgctgccgctcaaggctcccgcagccacgccgccaggcgcgccagcagggcatcgcacgcctcgagctgagcgaggctgacgaactcgtccggcttgtggccctggtccatgctgccgggaccgcagatcaccgccgggataccggcctggtggaacagcccgccctcggtgccgaaggccacggtggagaaatccgtcgaaccgctgagcaggccgatcagctccgccgcctggctgtcgtctgcggtgagcaggccgggataggccgatagcggcgtgaagcggatatcggtacttcgctccaccgcgcgcatccgcggcagcagttcgctttcggcatagtcacggagttcctcggcgacctgccgcgggtcgtccgccggcagcgcgcggacctcgaagtcgaagcggcactcggcgggcacgatgttcagcgcccggccgccctggatcagtccggtctgcaccgtcgagtagggcgggtcgaaacgccggtcgtggcgctccggcaccgccaggcgcgcgccgatctcgccgaggcggccgatcagccgcgcggcgtattcgatggcattcaccccctgcggggcgtaggccgaatggcaggccgcgccgtgcacctcgcagcgcatggccagcttgcccttgtggccgagcaccggcttcagctcggtgggctcgccgatgatgcacagcaacggcttgtgcggacgccgctccagcgccgcgagcagcgaacggacgcccaggcagccgatttcctcgtcgtaggagaacgccaggtgcaccggcaggcgcaacggcgcggcgaggaacgccgggacggccgccagcacgcaggccaggtagcccttcatgtccgccgtgccacgcccgtagaggcggccatcgcgctcgctgagcctgaacggcggcacgctccaggcctggccgtccgccggcaccacgtcggtatgcccggaaaggcagacgccgccacggtcgctggggccgatggtggcatagagattggccttgcggccgtcggcgtcgaagaacagttcgctgtcgacgccgaaacccgccaggtagtcgcggacgtagtcgatcagcgccaggttggactcgcggctgacggtgtcgaaggccaccaggtcggcgaggatgtcgcggctgccgggcatgtcgggctccagggcgcaggtctcgcgctgcgccgtcgaggaagggaacgacccgctcactcgtcgccgggcacgccgtagctcggcgcacgggtcgggtcgagggcgcgggtcacatagtcctgcatctgcggcttgtaggcgagccacagtcgctcgagctggccgatggggtcgtgctcggcccagtcgacgcgcaggtcgaccaccggccagagcaggtcgccgaccaccgacagcgccgccgaatgcaccggcccggcttcgccaccagcggccagcgcggcacgcatcgccgccagcaggcgctcggcgagcaggccttcggcgttctcgaaggcatccaccatcgcctcgatcacttccggcgcggccagcaggttgccggccgccacgcattgttcgccggcccgcgcatggtggacgccgagcgcctcgcggccggtgaacaacgcggtgcggccgtgctggtcgatcaccgtgacctggcgatactggccatagccgttgctgctcagcgcctggtccagcgcttcgccaggggccaggccctggtcgaggcggtcgaggatctgcgggccgagcgccggcagggtgatgttctgcgtagccaccgcgccggtgccggcgcgcagccagggacaacgggcgccgacggcgatgctcgacgagctgatggcgatgcccagctggccggtttcggcgcagcggccgacgatggaaaaggtcatggcgcgcgcctcctcattgcagccagtcgtcgggaatcaccgcgatcacgtcgatctccatcagccactgcggctggccgagggccgagaccaccagtccggtggagatcgggaacacccctttgagccacttgccgacttcgcgatagaccggctcgcggtagcgcggatcgatcaggtaggtggtggtcttgacgatgtgcgagaggtcgctgccggcttcctccagcagttgcttgacgttcttcatcgcctgctcggcctgggcgcgcgggtcgccgaggccgaccaggttgccgtcgaagtcggtgccgacctggccgcgcacgtacaccgtgttgccggcgcgcacggcctggcagagatcgttgtccagggactggttggggtaggtgtccttggtgttgaacatgcgaatgcgggtatgggtaggcatcagctgacttcctggaggctggtttgcggagcttgcgaggcgcggtcctgttcctggcgctgggcggcgtcgcggtatgcgaggtacttgcgctggatggcgatgtggtcggcgacatggcgcgcgtcgtgccagacgccccagatgaacgaggagccgcgccgcgacagccagggcaggccgatgaaatacacgccgggttcgctggacacgccacgctggtggcgcggcttgccgtcgcggtcgaaggcatcgacctgcagccagccgaagtcgacggcatagccggtggcccagatgatgctgcccaccccggcctcggccaggtccagttcgaggatcggatcggtcacgcactgcgggtccggcagccggcggcgcgcctcgggctcttccggcaggtcaaggccgttgcgggcgatataggcgtcggcggcgtcgagcaacgccaggtagttctcgtcgccgcgcgccaggttctccgccaggtccggccggaaggtcgcgacgccgtcgacgaaggattcggtcagtccgaccagggtcacgccctgatgcgccagggcgcggaagtccacggtatgtccgccgcgggcaccgctcacggcgatggtcacatgctcgcgcccgggcttggcgacttccgcatcccattcgccgagcacgcccagccaccagcagaagtcgcggttgcggtaggaacgcggcggacggtcatgagcgcccaccgagaggtagacctggcgcccggcacgttgcagctcgtcggcgatctgtacccccgacgaaccggcgccgaccaccagtaccgcaccttcgggcagctgctgcgggttgtagtagtgggccgagtggatctgccggatacgctcgtcgcgcggcgcgatcggcgggatcaccggacgctggaacgggccagtggcggcgaccacgcggttggcctcgatggtccctgcggaggtgtccacggtgaagccggggcggccgacattgcgcaccaccttcctcacctcgacgccggtacggatcggcgcgtcgaatttcttcgcgtaggcctcgaaataggccgccacctggtccttgccggggaaaccgtcgggatcgatgtcgaattccattcccgggaagcggtcgtgccaggccgggccgttggccaccagcgaatcccagcgtccgctgcgccaggcctcggcgatgcggttgcgctccaggaccaggtgcggcacgccgagccggctcaggtgctcgctcatcgccacgccggcctggccggcgccgacgacgagggtgtcggtcttttccacggtcccgtccgtgcgcgagggcaaggcggtgcgattcaggtcggtcatggctcggttcctcggactctggtcgttcttgttctgtggttgcgtgatggccgcattctgttcagagccggggaatagcgaaattatgatttttgtagtcgctggctagggaaaagctgcacgcccgcgcggtcggcgggcggcagaggcgtcgctcaggacctgccgacgatctggcgagctggagaaaccgggcgaaaacggacggggaagcggagtccccgaacggcaaccgagctttccgaagccgtttccaacgcggttttgccgacgtacagagttcgcgaaggttttcagaggatcggcgagaccagccgcgccacgcgcatccccagttgctgcaggcggcgcacgctgcggcggtcttccggagtgaattcgagcgactcggcgaagtccgcctcgagcatcgcctccacctcgccggcgaagccctcgtcgacggtcaccaccatcacctcgaaattcagccggaacgaacggttgtccaggttggcgctgccgacggcggcggtgtcgcggtccaccagcaccaccttctggtggaggaagccgggctggtagcggaacaccttgaccccggcacggatcgcctccagcgcgtagaggctggacgcggcatacaccgtgcggtggtccgggcgcgagggtatcagcaggcgcacgtcgacgccgcgcagcaccgccaggcgcagggcggccatcaccgcttcgtcgggaacgaaatacggcgaggtgatccagacccgctcgtgggcggcgttgatcatctcgacgaagaacagcgagcaggtttcctgggcatccgccggaccgctggcgactacctggcagagcgcgccctcgctgtcgtactgcggcggcaggatcagcggcggcaggctgtgggtcgcccagtaccagtcctcggcgaagctttcctgcaggcacgccaccgccggcccgcgcagttccatgtgggtgtcgcgccagggcgccagcggcggcttctcgccgaggtactcgacgccgacgttgtgcccgccgacgaaaccgcactcgccatccaccaccacgaccttgcggtggttgcggaaattcacctggaagcggttgagcatgccgctgccggtgctgaagccatgcatctgcacgccgccctggcgcagccgctcgacatagcggtgcggcagcgcgtggctgccgatggcgtcatagaggaagaacacctcgacgccgttggccgcacgttccagcagcagttgctggaggcgctggccgagggcgtcgtcgcggacgatgaagaactgcaccaggatcacctggcgggcggcggaaatcgccttgaacatcgcctcgaagctggcctcgccgttgaccagcaggcgcacccggttgttcgccagggtcggcgtgcgggtcatccgcaccagcgccttgagccccttgtagccgctgacctggcgggccgccagggcctcctcgacccagggacgccagtccagctcggcggccgccaggtgcatctcgcggttggcctggcgccgcgcctcgatgtaggcgtcgaaacggctgcgaccgaacaccaggtacggcagcagggtcaggtacggcatgaataccaacgaggtggcccaggcgatcgcgccctgggcggtgcgcacggtgagcacggcatggatggcggcgacgaagccgagtacctggataccgaccaacagcaggccgaggtaggtggtggaggtcattgcgcgaggtcgatccttgtccactccggtggcggccatcatagccctctccggggtaggtctggccagcctggcaaacagccaggggggcgaggcgggattggcaggatccgtgggatcgacgtcattcggccgcgctcgccctgccctacgctgctcccatcgaaaaccaccgcagaccgaggagcccgccatgagcgacgtccgtcccccgcttccccccttcaccgccgaaaccgccgcgcagaaggtccgcgccgccgaggacggctggaacagccgcgacccgcagcgcgtctcgctggcctacagtcccgacagcgtctggcgcaatcgctcgaccttcgtccgcggccgcgagcggatcgtcgaattcctcagcggcaagtggcagcgcgagcaggagtaccggctgatcaaggaactctgggcgtttaccggcaaccgcatcgccgtgcgcttcgcctatgaatggcacgacgactcgggcaactggttccgctcctacggcaacgagaactgggcgttcgacgagcagggattgatgtacgaacgtcacgccagcatcaacgacctgccgatccgcgaggaccagcggctgttccgctggccgctggggcgccggccggacaaccatccgtcgctcggcgaactcggcctctgaacccgcgccggcaggggcgcgcgcactccccgttgccggccccgggcggccagcgcctgttccatccgcgacattgccctccgtcgttgcggtcgcacgcttgacgctttcggcacgaccctggtcgttttcgggccgggtcgcgccgggccccgacgatatgctgcccccaaagcgtcggcacaagtcccggcgcgcccagcctgaaaggggtatgccagatgagcccagccgaattgcacgccgacagcatcgtcatcgacggtctgatcatcgccaagtggaaccgcgaactgttcgaggacatgcgcaagggcggcctgaccgccgccaattgcaccgtatcggtatgggaaggcttccaggcgacggtgaacaatatcgtcgccagcaacaagctgatccgcgacaacagcgacctggtgatcccggtgcgcagcaccgcggacatccgcaaggccaaggagcagggcaagaccggcatcctctacggtttccagaatgcccacgcattcgaggaccagatcggctacgtcgaggtgttcaagcagctcggcgtgggcatcgtgcagatgtgctacaacacccagaacctggtcggcaccggctgctacgagcgtgacggcgggctctccggcttcggtcgggagatcgtcgcggagatgaaccgggtcggcatcatgtgcgacctctcccacgtcggcagcaagacttccgaagaggtcatcctcgaatcgaagaagccggtctgctactcccactgcctgccgtccggcctcaaggaacacccgcgcaacaagtccgacgaggagctgaagttcatcgccgaccatggcggcttcgtcggcgtgaccatgttcgcgccgttcctcaagaaaggcatcgactcgaccatcgacgactacgccgaggccatcgagtacgtgatgaacatcgtcggcgaggacgccatcggcatcggcaccgatttcacccagggccacggccacgacttcttcgagtggctgacccacgacaagggctacgcccggcgcctgaccaacttcggcaagatcgtcaacccgctgggcatccgcaccgtcggcgaattccccaacctcaccgagaccctgctcgagcgcggcatgcccgagcgcgtggtgcgcaaggtgatgggcgagaactgggtaagggtcctgcgcgacgtctggggcgagtaactcccggcccactcccgactcgtcgcctctccctccagggaggggcattgcatcgcacccatcttccctctccccgcctctctccccgaagggagagagggagtcaaaagaatcggagcttacaccatggccaaacatgccccccaactgcccatcgaggtcgacagcgagaccggcgtctggaccaccgacgccctgccgatgctctacgtaccgcgacatttcttcgtcaacaaccacatgggcatcgaggaagtgctgggcgccgacgcctacgccgagatcctctacaaggccggctacaagtccgcctggcactggtgcgagaaggaagccgaatgtcacggcctggagggcgtggcggtgttcgagcactacatgaagcgcctgtcccagcgcggctggggcctgttcgagatcgagcggatcaacctcgaggaaggcaccgccgaggtccgcctgcggcactccgccttcgtctacgtctacggcaaggtcaatcgcaaggtcgattacatgttcaccggctggttcgccggcgccatggaccagatcctcgccgcccgtggcagcagcctgcgcaccgtggccgaacaggtctacagcggcgccgaggacggtcacgaagacggcctgttcgtcgtcaaacccctgtaagccgaggaaagggtcatggccttcgaagcaatgttccagccgatccagatcggcaagctgaccatccgcaaccgcgtgctctccaccgcccacgccgaggtctacgccaccgacggcgggatgaccaccgagcgctacgtgaagtactacgaggaaaaggccaagggcggcatcggcctggccatctgtggcggctcctcggtggtcgccatcgacagcccgcagcagtggtggagttcggtgaacctgtccaccgaccggatcatcccgcacttccagaacctggcggacgccatgcacaagcacggcgccaagatcatgatccagattacccacatggggcgccgttcgcgctgggacggctaccactggccgaccctgatgtcgccgtcgggtatccgcgagccggtgcaccgcgccacctgcaagaccatcgaggtggaggagatctggcgggtcatcggcaactacgcgcaggccgcccgccgcgccaaggaaggcggcctggacggcgtcgagctgtccgccgtgcaccagcacatgatcgaccagttctggagcccacgggtcaacaagcgcaccgacgaatggggcggtagcttcgaggggcgcatgaagttcggcctcgaggtgctcaaggcggtgcgcgccgaggtcggcgaggacttctgcgtcggcatgcgcatctgcggcgacgagttccacccggacggcctgtcccacgaggacatgaagcagatcgccaagtactacagcgataccggcatgctcgacttcatcggcgtggtcggctccggctgcgacacccacaataccctggccaacgtcatccccaacatgaccttcccgccggagccgttcctgcacctggcggccggcatcaaggaagtggtcgacgtgccggtgctacacgcgcagaacatcaaggacccgaaccaggctacgcgcatcctcgaaggcggctacgtggacatggtcggcatgactcgcgcgcacatcgccgacccgcacctgatcgccaagatcaagatgggccaggtcgaccagatcaagcagtgcgtcggcgccaactactgcatcgaccgccagtaccagggcctggacgtgctgtgcatccagaacgccgcgacctcccgcgaatacatgggcgtgccgcacatcatcgagaagtccgccggaccgaagcgcaaggtggtggtggtcggcggcgggccggccgggatggaagcggcccgcgtggcggccgagcgcggccacgacgtgaccctgttcgagaagaaggagcagctcggcggccagatcaccaccgccgccaaggcgccgcaacgcgaccagatcgccggcatcacccgttggtaccagctggagctggcgcgcctgggcatcgacctgcgcctgggcaccgcggccgaccccgagaccatcctcgacctgcgcccggacgtggtggtgctggccaacggcggacatccgttcctcgagcagaacgaacactggggcgccgccgaaggcctggtggtgagcagctgggacgtgctcgacggcacggtcgagccaggcaagaacgtgctggtctacgacaccatctgcgagttcagcggcatgtcggtggcggacttcctcgccgacaagggcgcccaggtggagatcgtcaccgacgacatcaagccgggcgtggccatcggcggcaccaccttccccacctactaccgcagcatgtatcccaaggaagtgatcatgaccggcgacctcatgctggagaaggtctaccgcgagggcgacaagctggtggcggtgctggagaacgaatacaccggcgcgcgggaagagcgggtggtcgaccaggtggtggtggaaaacggcgtgcgccccgacgagagcctctactacgcgctcaagcagggctcgcggaacaagggccagatcgacgtcgaggcgctgttcgcgatccagccgcagccctgcctcagccagcccggagaaggctacctgctgttccgcatcggcgactgcgtggcccagcgcaacacccatgcggcgatctatgacgcgctgcgcttgtgcaaggatttctaagacacgcctcgtggcatccgaccggcacggccggcccccctctcccgcaagcgggagaggaggccgatccagcgccgcctgacgtcccgcagggagaccagaaatgctcgacaccctcctccccgtcctgctcttcgccgccctggcacttgccgtgctcggcgccgcgaagcgcttcctcatgtggcgctgcggccgacccgccaaggtcgactggatcggcggcctcttgcagatgccgcgtcgctacctggtggacctgcaccatgtggtagagcgcgacaggtacatgtccaggacccacgtcgccaccgccggcggcttcgtcctggcggcgctgctggcgatcctggtgcacggtttcgggctgcacggccggatcctcggcttcgccctgctggcggccacggcgctgatgttcgtcggcgcgctgttcgtcgcccgccgccgcctcgacccaccgtcgcggctgtcgaagggcccctggatgcgcctgccgaagagcctgctggcgttcgccgcgagcttcttcctcgccaccctgccggtggccgggatcctgccggaaggcttcggcggctggttcctcgccggcctcctcgccattggcgtggcctggggcgtgtccgagctgttcctcggcatgacctggggcgggccgatgaagcacgccttcgccggtgccctgcacctggcctggcaccgccgcgccgaacgcttcggcggcggccgctccaccggcctcaaggcgctcgacctggccgatccgcaggcgccgctgggcgtggaaaagcccagcgacttcacctggaaccagttgctcgggttcgacgcctgcgtgcagtgcggcaagtgcgaggcgatgtgcccggcgttcgccgccggccagccgctgaacccgaagaagctgatccaggacatggtcatcggcctggccggaggcaacgacgcgaagttcgccggcagcccctatccaggcaaaccgctgggcgagcacggcggcggcccgcaccagccgatcgtcgcgctggatggcaaggccctggtcgacgccgacaccctgtggtcctgcaccacctgccgggcctgcgtcgaggagtgcccgatgatgatcgagcacgtcgacgccatcgtcgacatgcgccgccacctgaccctggagaaaggcgccacgccgaacaagggcgccgaggtgctggacaacctgatcgccaccgacaaccccggcggcttcgcccccggcggccggttgaactgggcggccgacctgaacctgccgctgatgagcgagaagaagagcgccgacgtgctgttctgggtcggcgatggcgccttcgacatgcgcaaccagcgcaccctgcgcgccttcgtgaagatcctcaaggcagccgcggtggacttcgccgtgctcggcctggaggagcgcgacagcggcgacgtggcgcgccggctgggcgacgaggcgaccttccagaacctggccaggcgcaatatcgcgaccctggcgaaataccgcttcacccgcatcgtcagctgcgacccgcacagcttccatgtgctgaagaacgaatacggcgccctcggcggcgactaccaggtactgcaccacagcaccttcatcgacgaactgctgcgcgccggcacgctgcaaccgggccgcagcaaggccggcagcgtcacctaccacgacccctgctacctgggccgctacaacggcgagtacgaggcgccgcgcaacgtgctgcgcgcactcggcatcgaggtcacggaaatgcaacgctccggcttccgctcgcgctgttgcggcggcggtggcggcgcgccgatcaccgacatccccggcaagcaacggattcccgacatgcgcatggccgacatccgcgagaccggcgccgagctggtggccgtcggctgcccgcagtgcaccgcgatgctcgaaggcgtagtggcgccgcggccggagatcaaggacatcgccgagctggtagcggaagcgctgatagaacaggcggaagcgccggcaaaaaagccgttgcggcgtgaagccgtggcggaggtgcattgatgagagtgtcgagcttcacatcgaacccgctgctgaccggggcagcacggatagcggcctctccctccagggagggggccgcaggatcgggtagccgcagccacaggaagcattccgcatgaacgatatcgtccgtcgcgatccacgcgccgaatggatcgcccgcaaccgcctgcatccgctgcatgcggccatgcagtccgcccaaggcggggaggtgcgctggatgggcccccacggcgtgatccgcaagaacccgcacgccgtcggcttcgtcggccccaacggcatccgccgcatcgatcgctccggcggccagcagggcagcggcgtgcgccgcgccagcgtagcgcaggaagcgcagttgctgctgcatgtggtcgagcaaccggcattcctcgtcgcggtggtcccggacatggtcggcggccgtctctccagccacgacaaggacctcctcggactggcccgcaagctcgccggcaacgacggcgcggtgctcgccgtggtgttcggcgaacacaaggaaagcgccttcgacagcgccggcgtcgaccgcctgctgcacctctccggcggcgagtacgacggctacgcgcccgagcagcgaatactcgccctgcgcaacctggagaaccagctcgccccgcgccactggctgttcccggacagtcgcaacggcggcggcgaactgggccggcgcctggccgccgcgctcggcgagcggccggccggtcgcgtctggcaggtcgaggacggccgctgcatcggccgcgccggcgccggccgcgaggacatccagcgcgccctgccgcgcctgctgctggccgcggcggaatgcgccgagccggtcagcgagacccgccatgaggttcgcgaactgcacatggccgagcaggtggcgcgcaacctgccacgcatcgaggacctcggcccggtggccgtggacccggcgcggattcccatggccgaggccgaattcattctctccggcggcaacggcgtgcaggactggacgctgttccaccaggccgccgccgtcctcggcgccaccgagggcgcctcgcgggtggcggtggacgacgggcacatgccgcgcaaccgccaggtcggcgccaccggtacctgggtcaccgcgcgggtctacctggcggtgggcatctccggggcgatccagcacctgcagggcataggcgcctgcgacaaggtggtggcggtgaaccgcgacgccggctgcgacatgatcaagcgcgccgatctctcggtgatcggcgactcgacggaaatcctccgcgcgctgatccgcctggccgaggcacaccgcaacggcgccgcccgcgatgcggcctgaacccgcttccacgtacctttcatcggtatcgaaccatgactgagctgaacatcgtcgcgctggtctccatcggcgcccatcccgcctccggacgcccgcgccgtgccgaacaggacgcccgcgcggtggaactcggcctgcgcctgagcggcccacgcctacaggtgctgcacgccggcgacccgcacgccgaggcgctgcgcggctatctcggcatgggcctggaacgcttgtccgtgctggaacagccggccggcgccgacgccctgcccgcactggccgagcacctgcgcgactctcgcgcccaactggtgctcaccggcagccaggcggaaaccggggaaggctccgggatgctgcccttcctcctcgccgagcgcctgggctggccactggtggtcggcctggccgaggtcgagaaggtcgaagacggcagcgcccaggtcctccaggctctgcctcgcggccagcgacgccggctgcgggtacgcctgccgttcgtcgccagcgtcgacaacgccgcaccggcggcccggcagagcgccttcggcccggcgcggcgtggcgaggtcgaggtccatgaggtggaggtggtcgtcgacccgctgctcgccgaagacagcctgcaaccggcccggccgcgcccgaagcggctcaaggtaatcaaggcgaagaccggcgccgagcggatgaaagccgccaccgccaaggcctccggcggtaccgggcaggtactcaaggatctttcggcggaagccggcgccgaagccatcttcaagctcctgcgcgaggaaggcgtgatccgctgaagcgggtcagaacgcactgtgcgccagatcacaagttatgacgcggtgacgataaattattgtattacgataatttattccctagtttcgccatccagacgcgaaacacacaggggaacccggcatggcgctgtccacgcatctcagcaaccacaagctctatctgctcggcatgctctgcgccatcctggcctggggcatggcctgcatcgaactcggagcgaacacccacctctggttctccggcctcagcgagcagggctacctgcaggcctggagcgatgaaatgccgcgcctggccagcgacggcttcgtcctgtcctggagcagccgggcgctgctgatgctgctggactacctgccgaccctgctttccgcgttcggcctggcgctcaccggcctgttcttccgccgcctggccaagggcgaacgctggtcgcagcgcaacgccaggaccctggtgcacatcggcctgctgtccttcctggcactcttgctccagccatttatcaatacgctgcaaggtcttgtactatctctcgacctgcccgacggcgagcgtgtcctgagcgtttcgataggactcacttccgaagcggcctacgagttcctcaaggcgatctttctctgctcgttcggcctgatgatgagcgaagccaggaaactggacgaagaagtaagagccttcatatgacgaccccatgatcatcatccgactagacgtcatcctggcgaagaacaaggtccgctccaaggagctggcggaagccatcggtatcaccgaacagaacctgtccctgctgaagaacggcaaggtcaagggcatccgcctcgacaccctggagaagatctgcgccttcctggactgccagccgggcgacatcctggaatacgtcgcggacgactgatccccgctccaccctttcccaaccagaaaccatgaacagacacctgaacctctcgggcgttgcgctcgcgctcgccctgatctcgggctgcggcccctccgtccgctaccagtacgtgatgccgccaagcgaggcgggacgcacctgcgtcgcccagtgccgcacgcaacagagccagtgcgaaagcctcgcgcgcctggaatggcagaacgaaaaccgcctgcgcgaagcggaacggcgcagctaccactattgcagccagggcaagagcaagaagcaggcgcgcaaggaatgcctggcaccaggctattcctcctcgttcggctacaacggcttcggcggctccggcaacttcaactgcggttccgactacgaccgctgcttcaccgacatctgcggcggcaccatccgccgcatcgtcgagcaaccctaatgatccccacccaccggagtatccccatgagccgacgcctcttccctctcctgccgttcctgttcctggtcggctgcgcccagggctatccctccttctccggcatccttccggacgtccgcgtcagcggcgacgaacgcagctacgccgagcgcgccgaagactgcctgaaacggcgcaactgcccgccggccaccgatcgcgatcccttcgtcgccgaccccgggcactactcgctgggcggcagctttcactggtgaagccgggtgccgaagcctggcaaccgaccacggacctggcttcggcaggcgcttttctttatcctgcgcgccctttgaacgactgggacgagatcatgctggagaacaccctggaacgcctggaaaccctggtagccgagctgctgcaacagaaccaggccctgcgcgacagccacgaccagcttcagcagcagctgcgccaggccaccgaggaaaacgaaaccctgcaactctccatgctcgagcaggaagaaaagcagagcggcacccaggcccgcctggaagccctggtcgagcgcctcagcgcgcagcaaccggttagcgcatgagccgcgacggcgtccaggtcctgtcgatcctcggccgggactattcgatccgcgtgccggccggcgaggagagggccctcgcggacgccgccgcgttgctgcaagcggaagtggacgccaacaagcgcaagtttccctacgtcaccagcaacgagctggtggtgctctccgcgctcaatctctgcgcccgccagctcggcgcgaacgacggcgagtcgccgcgcctgcgagcggtggagcagcgcctggaagcgctggtcgagcggatcgccggggcatccggctagtcgcgcgcctgcggactcgcccaatacagctgccgatgcccgcgcgcctggtagtccttgaccagcgcgcaggcctcgtcgcgcgtcaggtcgcggcgcatgacgaaggcattgccgttgtcgtcctggcgccacaggcaccagcgcgtttcctccgccggcttcgccgccaccgcgtcaggccttcagggtcgaagtcttgcgcaagcgcagcgcgagcatgaccagcaacacgccgaagaacaccgcgtaggcgccgatcacccagaccaccgccagcgccccggcgccggggttggcgatcatcagcacgccgaacagcaccgagatggcaccagagaggatcatccaccattcgttctggatcgacttgcgcaggcggatcgccgcgacgatctggaagatgcccatcgccagcgcccagccggcgatgatcaggagtaggccgatggcggtcagttgcggccagaagaacgcaaccagaccggccgccacgccgatcaccccgaccagcgccagcggccagttgaactgcccatcgctgcgcatgttgaacgcggcgatcagggcgaacgctccgtccaccagcgcgtaggcgccccagaacagcaccagcacggtcagcgccagggccggcgagagcagggtcaggacgccgaacaccagcgccgccacgccgcgcagggccaccagtttccagtgcttgcccagttcggcccacaggggattgttttccacgcttgcctccagaggccgcccttgagcggcccgttcaggttgagtcctcccaccttagtccttttgccgggaggctgtcagggggcggaggcgggaggcaaggcgtgcgcgcgggctcagggccgggacttctccggcggccgctggcggcgccagcaggcgaacaggttccaggccagcagcaggctgacgaaagcggaactgacgtagaacagcaggttgtccatgacctttcctccgcagcggcgccccgccagggggcgcctcgtccggctcagctgccggccaccttgcgcacgtgggcggactcctcgccgaggttgttcagcatgcgctcgctgtaccagtcgaggaaattgatcacaccgaactcgtaggtcttcgagtatggaccaggctggtaggcgtcggagttgatcccacgctggttctcctcggccagccgacgatcctggtcgttggtcgcgtcccatacctcgcgcaggcgcgccacgtcgtagtcgacgccttccaccgcgtccttgtgcaccagccatttggtggtgaccagggtttcctgggcgctgatcggccacacggtgaagacgatcaggtggtcgcccatgcagtggttccaggagtgcggcaggtgcaggatgcgcatcgagccgaggtcggggttcttgatccggcccatgagcttcttgctgccttgcttgccgtccatggtcatcgacaccgtgccgtccagcagcggcatgcgcacgatgcgattgcgcaggccgaagctggcatgggcgtacgggatcttctcggcgtcccaggcgctggtgcaggccgccacctggtccttgaacgcctggctggcgcgcgggtcggtgacgtcgtcccactccagcagggtcttcagcagttccgggtgggagccgttgcagtggtagcactcgcggttgttctcgatcaccagcttccagttggcggcttcgcggatggtggtctgcaccgccaccttggcgttctccatgtcgtacggctccatgtagtgctcgagcgtcgccaggaagtcgtcgatggccggcgggttctccgccaggctgatgaagatgtagccgccggcggtcttcacctggatcggcttcaggccgtactccttcatgtcgaagtcggcgcccatctcggtgccggcgaacagcaggcggccatccagctcgtaggtccactggtggtaggggcagaccagcttggccaccttgcctttctcgctcacgcacaggcgcgagccgcggtgccggcagacattgtggaaggcatgcacctggccttcggcgccacggatcaccaggaccgggttcttgccgatctgcagggtgaggaaattgcccttggcgggaatctcgcaggtcatgccggcgatcagccattccttgtggaagatctcctgcatgtcgatctcgaacaggcgctggtcgcagtagaagggctgcggcagcgagaagctgtggtcgcggctgcgcagcatgtcggcggtggccttgcgggccggttccaggggatcgccgagactcagggtggaagtgacgtccatcggtaactcctcatgccgcccccgcgcgggtggcggcggaaaaagtggctgatacggttgctacgcaaggtggcgttcacagccttcctcatcccggcgcggcgtccggaatcccgccctgccgatggacgggccccgccgtggcgggaatgaaggtcagtcgctctacacgtccgggctctaccctcccggggttcatgcaaaccctcgtctcggctggtctggagtgtgggcccgcgcccgccgccgaccttatccatgggcgacatgaccgcatccgtttccgacgctccgggccgcgccccagcaggcaggtcgcgataagcatgtaaatgtcgctggcaggtaaatgagcggccacggcgatgcgcacaatccgccccatcaggccatcgttcggccccgtgcgcacggagagatcatcatgtcgagcaacttcctcaatccggtcaccacccagacctgggccaacggccggcacctcgtgcgctgcgtcaaggtcatccaggaaacctgggacgtgcgcaccttctgcttcatggccgaccagccgatcctgttcttcttcaagccgggccagttcgtcaccctggagctggagatcgacggcgagccggtgatgcgctcctacaccatctccagctcgccctcggtgccctacagcttctccatcaccatcaagcgggtgccgggcgggcgggtttccaactggctgcacgacaacctcaaggaaggccaggagctaccggtgcacggtccggtcggcctgttcaacgccatcgacttcccggccgacaaggtgctgttcctctccggcggggtcggcatcaccccggtgatgtccatggcgcgctggttcttcgacaccaacgccaacgtcgacatggtcttcgtccacagcgcccgttcgccgaaggacatcatctaccaccgcgagctggagcacatggcctcgcggatcgacaacttcagcctgcacatcatctgcgagcgccacggcctcggcgaagcctgggccggctaccgtggctacctgaacctgcgcatgctggaactgatcgccccggacttcctcgagcgggaaatcttctgctgcggcccgacgccctatatgagcgcggtgaagcacctgctgcagggccacggctacgacatgagccgctaccacgaggaagccttcgggccgactccgccggaggtccgcgccgacgtcagggaactggccgcggaagccgccgaggcgccggaggtaccggtcgccgaccagcaccaggtggaattcaccgccaccggcaagagcatccgcgtcagccccggggaaaccgtgcacgccgccgccgccaagctcggcctgcacattccgaaggcctgcgggatgggcatctgcggcacctgcaaggtaatgaagaccgccggcgaggtggagatggagcacaacggcgggatcaccgacgaggatgtcgccgaaggctacatcctctcctgctgcagcgtgcccaagggcgacgtggtcatcgactactgagggcgcgagggaaacgccaggcgctcccagtagcgccgccgcggcagttcctcggccggcagccagcgtccggcgcaggcctgcagcggctcggcgggagccttcagcagcgagtccagggccagcacgtagcgccccgtccccgcgcagcggaagcacaggtcgtcgtcgaagctgtcgaagcacgggtactcgccgaggtcgtcgcggtagcgacgcaacgtccgctcttgcacgtcgagcagcagcaggcgccactggtcccgttccaggtcgctttcctcgtagcgctggacgtgccgggtcagcgccaggtagcgaccgtccgccgaccagatcattggcgccgccaggttgcccaagccgatgcccgacgcggtcagcaggtagccgtcgcggctgaacccggcgcgcacgtcctcgtcgcggtgcatgccctcgtagtggaaaccgaagccccaggcggcgtcctccgcgcccatcgacggcaagacgaagtcgccgtcgctccagggccgcggcgctgcgtccagccagcgcgacgtggggcacagccgccaggccgtgccatcgaacgccacccgcgcctgctcgtagtaatgccgccagtcgtcgtggaagcggccgaatgcgtgccaggcgccgggctcgggcaagccttcgtcgaagcggcgcaacaggccggggtcgccttcgcccggcccgcccggcggctggtaggcgttgcggccgagcaggtggagcagatgcacctggccatcgatgaaaccttgcaggtgtagatcggccagcggctcggcgagccactccaggcgccgctcccggctatcgagtatggccaggcgctgcggcagggtcggcgcctcggcgaaggccaccacggccaggtagcgaccgcaatcggacacgcggtggtcgagcgtccactcgccatccaggcgccagtcgcccaggcgcaaggcataggcgccgcgctccgcctcctgatcgtcgcgcaaccactcccagacggcccggctgccatcggccagcggtgcgctctgcaacaggcatcccggcctgccggccgcgccatccaggggcagcaacaggtccaggcgcggcatgtcggcctcgcgccagcgcggccggtcgtccgcatcgcgagcgtgcagaaggtagaggctggaatggctgtacgaacccagcgtgccgtagcgttcgtaggtcaggcagggttgcgccaggtccaggccgaaacgcagccagccatcctccagcccgagcagttcgggcccgccggcatggggctcggcgggcaacgccgaccacggcgcgcccagcgcacgcaggccgccgtcctctcgccaaagccagtaggtatcctgccccagcggctcgcctgcagcctgcagcgccagcgcccggccgtcatcgctccaagccaatggcggcgcttcacgggacaggtagaggccgctggcctcgccgtttatccacagctcgccgcggttggcgcgcagcggcgcgaaaggatcgtccagggccagcaggctggccggcagccaggggcggatttccagcgcgggcccgccaagcggggacggtagcggttgcgcgcgcaggtccctgctccagcgctgccattcgctctcgggcagccagaggtcgccgatggcaacgaaggcctcggcctcgctgccggccttgagcgcctgcagctcgaggcgctgcggtgcgttggacgtcagcggactgtgccgcccgatcacctcgcgctcggtgacgctgtccagctcccagaagttgtccacggcacagcggtagagcaaccgctcctgccggtcgaagatcgccaggccccacgcgcctcggctcggtatcggcgaaacgaagtggcggccatcgctggaaaagcgtgccgaaggattgcagtcggggatgaaacagccgtcgggcatcaggtagtggcataccagcgggccgcccatggcgatctcgccgccgtcgaacaggcggatcgcctcgccctcgggggtccgctcgggcgcttcgccgccccatgcgctacctccggccggcaggggtacgtccagcgcttgcggagcctggcgctccaggcgcaggccgcgctcgaagcggatctgcaacagcacgccgccgatcaccgccagcaagccaccgcccagtcccagccagaagcccggcagtgcctggcccagggcgatgccgccacccagaacccagaagaacagcgcctgttgcaggcgatacggcaccttgccgcgccaacgatccgtggcccactcggcgcccagcagcagcacccaacccagcgctaccagcggcaacggaaggaggacgccaagggccaccagcacggcgatccaggcgatctcgccgaggccttcgagcaacaagcggccgagcggcttgtctgacatccgatcatccatgatccatgatccatcccactttcctggcaaaagccaagggtaatcaaggctccggccaaccaccagagccacggcgaagctgaccttctcatactggaaaacaccagggcgccaaggttgtccacattcggactggaattccatacaggtgttccttcgccgcctggatgtccgccatgtgttcactcaagcatttgaaataaaagataaattctacaaattcaagtgcatttcagggccggctattcagcccgtccctgcctccgggaagccctttccaggctagcttgatcacagacttatccacaagttgtgcaatccatcgcctcctctatgtcctacgggtccagaaacaacataccgacaatacctcctccgtggcgcgagggctccgcaagcccatccggctttccttccgggtaaatcgcacttcgccgcacgctcggcctggccgcactctcctgctcatttaacgatcaatacgccagagaccccgccgtacggcccccccaagcgtgagcgaacaacttttccacagggctttacacttcccgtggggaaaaacaaaaaaatattcacagcatgaagaaaaatctctgctttctcaggcagtccggctcttcccatgcgcaccgatcgtttattgatcaatccaccgcaggcttagccctatgcggcttctggcgctatccatacaggttgtccacaagactttccaggccttttgtgggcaaccctgcatttatacacaagctccctaaagcaagcccgccacctgttgacagaacatccggtcaattcttgatcaattccctgaaaggctcgccccaccgggctctccgcactctataaacaggctcttcacatcgacctcaacaggaattgggggaaattcccctcggcgattgcttccattgtcccagcgacttcggaacggaagaattttgtctttttcctcaatccgttacgtccgcgcagggtgttttcgacttttgcgcccacttcgctccccgtcttttctatccacaggcttgcatgggcccggaggggacaatacccgtcaccgtttcgtcagcgcgtttcacccgaaccgtcatcctctgttcacaaacggctgttttcgctcaaaaaccgaccagcctccggagagcccggcggggcgctgcccggaagcgactgcgaacacgttattcacattcggttccacagtgtttgtggattggacaggttatcccgccactggagtggagccgcgtggataaaggctttcggcgtctcgggcggagacaggaaggacgttccagggagcacttttgcatagctcccgaacagttagcccacagagttatccacagaatttggggaaagagcggccgccccgcgccatgggggcgaccgagagcggactcaggcgcccatcaccaggcggatgtcccgcgccagttcgcggacccgctcgatatcggtatcccaggaacacatgaaacgcgcgccaccttcaccgatgaaggtgtagaagcgccagccgcgcgcgcgcaaggcttcgatcgccggctcggagagctgtaggaacacgccgttggcttctaccgggaacatcaggctgacgccgggaacgtcggccaccagctcggccagcaggcgcgcgcagcggttggcgtgatcggcgtagcgcagccaggcatcgtcctgcagtacgccgacccagggcgcggcgaggaagcgcatcttcgaggccagttggccggcctgcttgcagcggtagtcgaagtcctcggccaggtcgcggttgaagaacaggatcgcctcgcccaccgccatgccgttcttggtgccgccgaagcagagcacgtcgaccccggccttccagctcagctccgccggcgagcagccgaggaaggcgcaggcgttggagaagcgcgcgccgtccatgtgcaggtgcaggccgagctccttgcaggtggcgctgatcgccttcagctcgtccgggcggtacaccgtgccgacctcggtggcctgggtgagagtcaccacgcgcggcttcggatagtggatatcctggcgcttgagagcgatgtcgcggatcgacgccggggtcagcttgccgacctcggtctgcgccagcagcagcttggagccattggagaagaactccggcgcgccgcactcgtcggtctcgacgtgggcggtctccgagcagatcacgctgtggtagctctggcacagcgcagccagggccagggagttggcggcggtgccgttgaaggcgaagaacacttcgcaatcggtctcgaacaactggcggaagtagtccgaagcacgcgcggtccactggtcgtcgccataggcgcgttcgtggccgcggttggcttcggccatcgccgcccaggcttcggggcagatgccggaatagttgtcgctggcgaactgttgggtgtgatcggtcatgtgggcctctggaacggttgccgagcccttgtggggctccatgcggtcgtgccggcacgggtacgtgccggcacagtctgtcagggtagcttggtcagcttcatctgctcgacgaacggcaccagcacctggcgcatcgccgtggcgctgccgccattgggcgtgtcgcgggtgctgagggtcagtacgtagcggttcttgatcactccgctgagggtcgagacgccctcctcgcccttggccgggaccatcactcccagcgggtcgcccatccgcgtggtatcgatcagcggcaggtagtcctcgccgccgaagcgctcggcggtgccgttcttaagggcggtctcgcgggtcttgtggagcagggtcaggttggtctgggtcatctcgcgcagcttgtcctgcgccgcccgataggacaccgcgtcgccctcggtcggcggcgccggcaggccggtgtcggtgaggacgatctccaggcgcttgctgccgtcggcggcgccgaagaccacggtggcatcgttgtagccgcactggcgggagaggaagtcgtagccgaacagtggcttgccggccggcggcaaggccacttcgagttcatggccggtgcaggaatcggccggcagcgcaggcgcggcggcctgcttttcatcgccgcccccgcacccttgcagggatgcgccgagcagcacggcggaaaggaagatcagcgggcgtttcatggtgttctcgcaagacgaagagcacgcagtttagcgccagcccggggcgttccgcatcggttgccgattcccaccgccatgtcgcaaacgcacctccccgtggcgtgcataggcatctgggccggcagggccggtcataccatcgctggcaaagggaccgcgtgtcccgttgcagccattccggcgcggttccggcgccgcagggagacccagcgatgttcagcaagcatgaccagatccgcggctacgacgacgaactgctcgccgcgatggacgccgaagaggcccgccaggaagaccatctcgaactgatcgcctcggagaactacaccagcaagcgggtcatgcaggcgcagggcagcggcctgaccaacaagtatgccgagggctatccgggcaagcgctactacggcggctgcgaacacgtcgacaaggtcgagcagttggccatcgaccgcgccaggcaactgttcggcgccgactacgccaacgtccagccgcattccggttcctcggccaacgccgcggtgtacctggcgctgctcaacgccggcgacaccatcctcggcatgagcctggcccacggcggccatctcacccacggcgccaaggtgtcctcctccggcaagctgtacaacgccgtgcagtacggcctggacaccgctaccgggctgatcgactacgacgaagtcgagcgcctggccgtggagcataagccgaagatgatcgtcgccggcttctccgcctactccaagaccctcgacttcccgcgcttccgcgccatcgccgacaaggtcggcgcgctgctgttcgtcgacatggcccacgtcgccgggctggtcgccgccggcctctacccgaacccgatccccttcgccgacgtggtcaccaccaccacccacaagaccctgcgcggcccgcgcggcggcctgatcctggcgcgcgccaacgaggagatcgagaagaagctcaattccgcggtattccccggcgcccagggcggcccgctgatgcacgtgatcgcggccaaggcggtgtgcttcaaggaagcgctggagccgggcttcaaggactaccaggcgcaggtgatccgcaacgccaaggcgatggccgaggtgttcatcgggcgcggctacgacgtggtttccggcggcaccgacaaccacctgatgctgatcagcctggtgcgccagggcctgaccggcaaggaagccgacgccgccctcggccgggtcggcatcacggtgaacaagaacgccgtgccgaacgatccgcagagcccgttcgtcacctccggcatccgcatcggcaccccggccatcaccacccgcgggctgcaggaagcgcagagccgcgaactggctggctggatctgcgacatcctcgaccacctcggcgatgccgacgtggaggccaaggtcgccacccaggtcgccggtctctgcgcggacttcccggtctatcgctgagccccccgaagacggtcggggagcccgacgcgccccggcccaaccctctccgcgggagagggagcaacagttcaggagcatccacatgcaacgctactccggcttcggcctgttaaagcattcactgagccatcacgagaactggcaacgcatgtggcgcacgcccacgccgaagccggtctacgacgtggtcatcgtcggcggcggcgggcacggcctggccaccgcctactacctggccaaggaacacggcatcagcaacgtggcggtagtcgagaaaggttggctgggcggcggcaacaccgcgcgcaacaccaccatcgtgcgctccaactacctgtgggacgagtccgcgctgctctacgaacacgcgatgaagctgtgggagggcctgtcccaggacctcaactacaacgtgatgttctcccagcgcggggtctacaacctctgccacaccctccaggacatgcgcgacggcgagcgccgggtcagcgccaaccgcctcaacggcgtcgacggcgaattgttgaacgcgcagcaggtggcggaggagattccctacctggactgcagcaagaacacccgctacccgatcatgggcgcgaccatccagcgtcgcggcggcgtcgcccgccatgacgcggtggcctggggcttcgcccgcgccgccgatgccctcggcgtggacctgatccagcagaccgaagtcaccggcttccgcaagcaggacggcgcggtgatcggcgtcgagaccaaccgcggcttcatcggtgcgcgccgtgtcggagtggtcaccgccggcaactccgggcacatggccaggctcgccggcttccgcctgccgctggagtcgcacccgttgcaggcgctggtctccgagccgctgaagccgatcatcgacagcgtgatcatgtccaacgccgtgcatggctacatcagccagtcggacaagggcgacctggtcatcggcgccggcatcgacggctacaacggctacggccagcgcggctcttacccggtgatcgagcacaccctgcaagccatcgtcgagatgttcccggtgctctcgcgggtacgcatgaaccgccagtggggcggcatcgtcgacaccaccccggacgcctgcccgatcatcggcaagactccggtgcagaacctgttcttcaactgcggctggggcaccggcggcttcaaggccactcccggctccggaaacgtcttcgccgccaccctggccaagggcgaaccgcatccgctggccgcgcccttctccatcgaacgcttccacagcggtgcgctgatcgacgagcacggcgcggcggcagtggcgcactgacaaaagccgcccgaagggcgaaatccgctgcccctcgcccttcagggagagggtgccggtcaaccggcaagaacagtttccggaggctacaaaatgctgaatatcttctgcccccactgcggcgaactgcgttccgaagaggaattccacgccaagggtcaggcccacatcccgcgcccgctcgacccgaacgcctgcagcgacgaggaatggggcgactacatgttcttccgcgacaacccgcgcggcctccatcacgagctgtgggtgcacgccgccggctgccgcaagtacttcaacgtcacccgccatacggtgacctacgagatcctcgagacctacctgatcggcgagcagcccagcgtcgtcgccgacggtgagaagaaagccgccgtacaaggggaaccggcatgagccagatcaatcgcctgtccagcggcggccgcatcgaccgcaaccgcccgctgaccttcagcttcaacggccagcactaccagggctatgccggcgacaccctggccgccgcgctgctggccaacggcgtcgacatcgtcggccgcagcttcaagtactcgcgggcgcgcggcatcgtcgccgccggcgccgaggagcccaacgcgatcctgcagatcggctcccgcgaagccacccagatccccaacgtacgcgccacccagcaggccctctacggcggcctggtggccaccagtaccaacggctggccgaacgtgcagaacgacctgatgggaatcttcggcaaggtcggcggcaagctgatgccgcctggtttctactacaagaccttcatgtacccgcagtcgatgtggatgacctacgagaagtacatccgcaaggccgccggcctgggccgcgcgccgaccgaggtcgatccggacagctacgactggatgaaccaccactgcgacgtgctggtggtcggcggcggcccggccggcctggccgccgccctcgccgccgctcgcagcggcgcgcgggtgattctcgccgacgagcaggaagagttcggcggcagcctgctggacacccgcgagaccctcgacggcaagcccgccgccgagtgggtcgcggacgccgtggccgagctgcaaggcctgccggaagtcatcctgctaccgcgctccacggtcaacggctaccacgaccacaacttcctcaccatccacgagcggcgcaccgaccacctcggcgaggtcgccccgctcggccaggtccgccagcgcgtgcaccgcgtacgcgccaagcgcgtggtactggccgccggcgcccatgagcggccgctggtctacggcaacaacgacctgcccggcaacatgctcgccggcgcggtttccacctatgtacggcgctacggcgtggcaccgggcaagaaactggtgctggccaccaacaacgactacgcctaccgcgtcgccctcgactggcaggaagccggcctgcaagtggtggccatcgccgacgcccgggccaatccgcgcggcgagtgggtcgaggaagcacgccaacgcggtatgcgggtgatcactggcagttcggtgatcgaggctcgcggcggcaagcgggtcagcggcgccaaggtcgcccggatcgacctgcaggccatgcgcgccagcggcggcgaatggctggactgcgacctgatcgccagctccggcggctacagcccggtcgtgcacctggcctcgcacctgggcggcaagccggagtggcgcgaggaaatcctcgccttcgtccccggcgaaggcctgcagaagcgcatctgcgccggcgccgtgaacggcgtgttcgggctcgccgaggtgctcgccgacggctaccaggccgggagtcgcgccgccctcgacgccggctacaagaccgccgccggcagcctgccgaaggtccagccgcgccgcgaggaagcgtcagtcgcgctgttccaggtgccccacgagaagcccacggcgcgcgcgccgaagcagttcgtcgatccgcagaacgacgtcaccgccgccgccatcgaactggcctgccgcgagggcttcgagtccatcgagcacgtcaagcgctacaccgcgctgggcttcggcaccgaccagggcaagctgggcaacatcaacggcctggcgatcgccgcgcgggcccagggcaagagcatcgccgacaccggcaccaccatgttccgtccgaactacaccccggtgaccttcggcgccgtcgccggccgccactgcgggcacctgttcgaaccggtgcgcttcaccgccctgcacgcctggcacgtgaagaacggcgccgagttcgaagacgtcggccagtggaagcggccgtggtacttcccgcgccggggcgaggacatgcacgccgccgtggcccgcgaatgccgcgcagtgcgcgaggcggtcggcctgctcgacgcctcgaccctgggcaagatcgacatccagggcccggacgcgcgggagttcctcaaccgggtctacaccaacgcctggaccaagctcgacgtcggcaaggcgcgctacggcctgatgtgcaaggaagacgggatggtcttcgacgacggcgtgaccgcctgcctggccgacaaccacttcgtcatgaccaccaccaccggcggcgccgcccgcgtactggagtggctggagctgtaccaccagaccgaatggccggagctgaaggtgtacttcacctcggtcaccgaccactacgcgaccctcaccctgtccggcccgaacagccgcaagctgctcgccgaagtcaccgacatcgacctggacaaggatgccttccccttcatgacctggaaggaaggcaaggtcgccggggtgccggcgcgggtgttccgcatctccttcaccggcgagctgagctacgaggtgaacgtccaggccgactacgccatgggcgtgctcgaagcgctcgccgagcacggcgcgaagtacggcctgacgccctacggcaccgagaccatgcacgtcctgcgcgccgagaagggcttcatcatcgtcggccaggacaccgatgcctcggtcaccccggacgatctcaacatgggctgggcggtgggccgcagcaagccgttctcctggatcggctggcgcggcatgaaccgcgccgactgcctgcgtgaggatcgcaagcaactggtcggactcaggccgagcaacccgcaggaggtactgcccgaaggcgcgcaactggtgttcgacacccagcaggcgatcccgatgaagatggtcggccacgtcacctccagctacatgagcgccagcctcggccacggcttcgccctggcggtggtgaaaggcggcctcaagcgcatgggccagaaggtctacgcgccgctggcggacggccgcttcatcgaggcggagatctgctcctcggtgttctacgaccccaaaggggagcggcagaacgtggattgaccggagagggatgcgctcctctccccggccctcttcccgaagggagaaggcagacaggctaccagggcgcgcggcgccccaaggtgaaaacgaatgagcaaggcaaacgtctaccagcaacgccccgaacccggcgtccacgccgaatcgccgctgcaccatgccgagctgcacaagctcgccggcaagaccgccgcgaaggccggtatcgtcctgcgcgagaagaagctgctcggccacctggtgctgcgcggcgatgccgccgacccgaccttcgccgccgccgtgcaccaggccctcggcctggaactgccggtggccctgaccctggtcgccagcggcgagacctcgctgcaatggctggccccggacgaatggttgctgatcgtccccggcggcgaggaatacgccgtcgaacagcgcctgcgccaggccctgggcgaggagctgcactacgcggtggtcaacgtcagcggcgggcagacgctgctcgaactgagcggagcgaacgtccgcgaactgctgatgaaatccaccagctacgacgtgcatccgagcaacttcccggtgggcaaggcggtcggcagcatcttcgccaagtcgcaatgcgtgatccgccataccggcgaggacacctgggagctggtcgtgcgccgcagcttcgccgactacttctggctctggttgcaggacgccagcgccgaatacggcctgcaggtagcggcatgagcagccttcccctctccccgagaggggataccggacccggagcctcgcgatgagccgtacccccgacacctggatcctcaccgccgacagtcccagcctgctgggcaccgtcgacgtggtgacgcgctacctcttcgagcagcgctgctacgtcaccgagcaccactcgttcgacgaccgcctggcgcaacgcttcttcatccgcgtggagttccgcgccggcgacggcttcgacgaagcctccttccgcgccggactggccgaacgggtggcaccgttcggcatgcgtaccgagctgaccgcgccgggctaccgcagccaggtggcgatcatggtttccaaggccgaccactgcctgaacgacctgctctaccgccagcgcatcggccagttgccgatggacgtggtggcggtgatttccaatcacccggacctggagccgctggcgcgctggcacggcattccctaccaccacttcccgctcgacccgaacgacaagccggcccaggaagccagggtctggcaggtgctcgaagagagcggcgccgagctggtgatcctcgctcgctacatgcaggtgctgtcgccggaactgtgccggcgcctggacggctgggcgatcaacatccatcactccctgctgcccggcttcaagggcgccaagccgtaccaccaggcctaccagaagggcgtgaagctggtcggcgccaccgcccactacatcaacaacgacctcgacgaagggccgatcatcgcccagggcgtcgagacggtcgaccacgcccactaccccgaggacctgatcgccaagggccgcgacatcgagtgcctgaccctggcgcgggcggtgggctaccacatcgagcggagggtattcctcaacgccaatcggaccgtggtgctgtaagcgcgccctctcttcccaaccctcgctgaaggaagagggccagggagaggggcgcttcccacggcctcgcgtcccgagcaacaccgacagcccgccggctgccagcattctccggccctgtcgcgcaacagacgactttccagtgcaaagccgcgcggccgtggacgccgcgcatttgtacccacaacgacaaagaggaaacgcgtatgtctggcaatcgtggtgtggtctatctcggcccgggcaaggtcgaggtgcagaacattccctatccgaagatgcaggacccgcagggccggcagatcgaccacggggtgatcctgcgggtggtctccaccaacatctgcggctccgaccagcacatggtgcgcggccgcaccaccgcgccggaaggcctggtgcttggccacgagatcaccggcgaggtggtggagatcgggcgtggcgtggaaaccatgaagatcggcgacctggtctcggtaccgttcaacgtcgcctgcggccactgccgtacctgcaaggaacagcacaccggcgtctgcctgacggtcaatccggcgcgtgccggcggcgcctacggctacgtcgacatgggtggctgggtcggcggccaggccgaatacgtgctggtgccctacgccgacttcaacctgctgaaactgcccaaccgcgaagcggcgatggagaagatccgcgacctgacctgcctttcggacatcctccccaccggctaccatggcgcggtcaccgccggcgtcggcccgggcagcacggtctacatcgccggcgccggtccggtcggcctggccgcggcggcctcggcacgcctgctcggcgcggcggtggtgatcgtcggcgacgtcaacccgacccgcctggcccacgccaagaaacagggcttcgagatcgccgacctgtccaaggacaccccgctgcacgaacagatcgccgctctgctgggcgagccggaggtcgactgcgcggtcgatgcggtcggtttcgaggcgcgcggccacggccattcgggctcgcagcaggaagccccggccaccgtgctcaactcgctgatgggcatcacccgggtcgccggcaagatcggcattcccggcctgtacgtcaccgaagacccgggcgcagtggacgcggccgccaagcacggcgccctgagcatccgcttcggcctgggctgggccaagtcgcacagcttccataccggccagaccccggtgatgaagtacaaccgccagctgatgcaggcgatcatgtgggaccggatcaagatcgccgacatcgtcggggtggaagtcatcaccctcgacgatgcgccgaaaggctatggcgagttcgacgccggggtgccgaagaaattcgtcatcgacccacacaacctgttccgcgcggcctgaacctccggcaacaaccgacgcggcccacgggccgcgtcgtcgttggcgctatccgggggaactgccggcgataaaatggatcggtgatactgctgccatccattcgcctcccggagaccgccatgaacaccgatagcccgatcaaccgcgtcgaacaggtacaggtcgacgacctggcctgctggcgcatccacaccgcccatggcgaggcgctgatcgcccagcagggcgcgcaactgctcagctaccagccccacgaacagccgccgctggtctggctcagcgacgaggccggctaccggcgcgggcagtcggtacgcggcggggtgccggtgtgctggccgtggttcggtccgctggagcgcaacccgcaggaagtccgcggccaggtggaagatggcctgaaggcgcccgcccacgggctggtccgggcagtcgactgggaaatcgacgacatcgccgaggaggacggcgacctctgcgtcagcttccgcctcgacgcccccgatggcctccccggctggccgcacccggcggcgctgcgcatgctgttccgcttcggcgagcgcctgaccctgcgactcaccagcgagaacctcggcagcaagccgctggtgctcagccaggcactgcacacctacttcgcggtcagcgacagccgcgagatcgccatcgagggcctggaaggcgcgcgctacatcgagaccctggagaactgggaagaacgcactcagcacggcgcggtacgggtcaagggcgaactggatcgcatctacctcggtctcgaacgcgacctgctgatcaaggacccgcgctgggaacgcagcatccacctgcacgccctcgactcgcgctcggcggtggtctggaacccctgggtggacaagtcccggcgtctctcacagttcgccgacgacgcctggcagcagatgctctgcatcgagaccgggcgggtctgggacgacctcatggtggtcgcccccgggcgcagcgaaagctttggcgtgcagatctggagcgagccgctgaaacgaccctgagcgggtcggcgagcggacggcgcggctcgcatcgtccgccatggaccgttgcgcaggtgccggccctacaggtccgcttcctccaccaccttcacccgcgccttgtcgatggcgtaggcggcatcggccaggtcattgctcacctgctcgatcttcagcgtgccgctgacccacagcggggtgtagatatcggtcagcttcagcccctgtggataacgcaccaggacgatctggttcggcggcggcggcggcacgtggatgcaggcgcccggatagggcaccaggaagaattcggtgacgcggcccttggcgtcgttctccagcggcaccgggtagccgccgaggcggatcgccttgccatccaggctggcgacggtcttggccgaatacatcaccgccggcatcttccggtccgactgcttcaggccccctttgctggtgaaggtgccggcggcctccggggtgtcgtgaacgatgtcgggcatttcttccagcgccttgcggtcggccggcggcatcagttccagccagtcggtctcgggcagttcggcgtgggccaggggtgaggacaacagggcgagcagcaacaggcgggcgaacgggaagcggcgcatgatggcgggaataccggcgaagtgaggaaacgccggcccccgcgggggccggccagagccatcaattcttcttgatcaggccgtaaatgaccagcagtacgacggcgccgaccaccgcgccgatgaaaccggccgcctgaccggcctggtagaagccgatcgcctggccgccgtaggtggccagcagcgaaccgccgatgccgagcaggatggtcatgatccagcccatgctgtcgtcacctggcttcagaaagcgtgcaacgagaccaacgatcagtccgacgatgatggttccgattaatcccatgacagtccctccttacgggtgtatgcgcatgtattgcgcctgccatgggacagtgtagaaaagccttgggttcagtgccgcccgccaacccaaggatgggcggacggcaatcgctcacgcctcgatcagcgcctcgacctcggcgatgcgcgcctgcagcgtcgcccggtcggcacagcgcagggtggcatggccaaccttgcggccgttcttgaaggccttgccgtagtgatgcaggtggcaatcggcgacggcgaccacctgagccaccgggggcaccgcgccgatgaaattgagcatcgcgctctcgccgaccttggcggtcgagcccagcggcaggccggcgacggcgcgcaggtggttctcgaactggctgcactcggcgccttcgatggtccagtgcccggagttgtgcacgcgcggggcgatctcgttggccttcaggccgccgtccacctcgaagaactcgaaggccagcacgccgacgtagtcgagccgggccagcacacggccgacgtagtcctcggccagcgcctgcaacggatgcgcgctgctggccacggagagcttgaggatgccgctgtcgtgggtgttgtgcaccagcgggtagaaacgcgtctccccatcgcgagcgcgcaccgccaccagcgagacttccccggtgaacggcacgaagccctcgaggatgcacggcacgctgcccagttcggcgaacgcgccctgcacgtcggccggctggcgcaggaccttctggcccttgccgtcgtagcccagggtgcgggtcttgagcaccgccggcaggccgatggcggctgcggcggcatcgaggtcggcctgggactggacgtcggcgaagtccggagtgggaatgccgaggtccttgaacatcgacttctcgaaccagcggtcgcgggcgatgcgcagcgactcggcgttcgggtagaccggcacgaactgggagaggaaggccacggtttccgccggcacgctctcgaactcgaaggtcaccaggtcgacctcgtcggccagttgccgcaggtgctcctggtcgccgtagtcggcgcggatgtgctcgcccagggaggccgcgcaggcgtccggcgccgggtcgaggaaagcgaagttcatgcccagcggggttcccgccagggccagcatgcggcccagctggccgccaccgatgacaccgattttcatggttcgagccttaccttctcagagcctgtctcacgcatcgcgcgggtcgggattgtccagcacggtttcggtctggttggcgcggaactgcttcagcgcctcgtggtactgcgggtgcttggcgccgaggatgctcgccgagagcagcgccgcgttgaccgcgccggccttgccgatggccagggtggcgaccggtacgccggcgggcatctgcacgatggagagcagcgagtcgacacccgacagcatcgacgactgtaccggcacgccgagtaccggcaggtgggtcttggccgcgcacatgcccggcaggtgggcggcgccgccagcgccggcgatgatcacttcgaggccgcggccttcggcttcctcggcgtactggaagagcaggtccggggtgcggtgggcggaaaccaccttcacttcgtaggggatgcccagcttgtccagcatgtccgcggtgtgactgagggtgctccagtccgatttggaacccatgatcacgccaaccagtgcgctcatcgtcgtgcctctctcaaatgcgccgtccggcgcgtcagaaaccaacaagccacgcttcgtcgaggggcgtggcttgtactgggccgagccggcgggcagtgccggttcgaaggcggcgcagtataccgcaaaggcaggccgggcgcgcgccgggggctaccgtccgtcccgttttttcgcgccatggcgggaaacttgccgcaactcaatgcgcgcctgccacgagcggccagactggttgtcgcggcgcgctccgagggagcggcggccgcgccggttccgcagcctgtcgcggtgcccgtcaaaggcgccgcgacaggcgctcagccccgtccaaggagatgaccatgaccctgccacagaccatgaaagccgcggtcgtgcacgcctacggcgcgccgctgcggatcgaggaagtcaaggttccgctgcccggccccgggcaggtactggtgaagatcgaagcctccggcgtctgccacaccgacctgcatgccgccgagggcgactggccggtgaagccgccgttgccgttcattcccggtcacgaaggcgtcggctacgtcgccgcggtgggcagcggagtgacccgagtgaaggaaggcgaccgggtcggcatcccctggctgtacaccgcctgcggctgctgcgagcactgcctgaccggctgggagaccctctgcgagagccagcagaacaccggctactcggtgaacggcggctatgccgaatacgtattggccgacccgaactacgtcggaatcctgccgaaaaacgtcgaattcgctgaaatcgcgccgatcctctgcgccggcgtcaccgtctacaaggggctcaagcagaccaacgcgcgccccggccagtgggtggcgatctccggcatcggtggcctcggccacgtcgccgtgcagtacgccagggccatgggcctgcacgtcgccgccatcgacatcgacgatgccaagctggaactggcgcgcaagctcggtgccagcctgacggtcaacgcccggcaggaagacccggtggaggcgatccagcgcgacatcggcggcgcccacggggtgctggtcaccgcggtatccaacagcgccttcggccaggccatcggcatggcgcgccgcggcggcaccatcgccctggtcggcctgccgccgggtgacttcccgacgccgatcttcgacgtggtgctcaagggcctgcacatcgccggctcaatcgtcggcacccgcgcggaccttcaggaagccctcgactttgccggcgaaggcctggtcaaggcgaccatccatccgggcaagctggacgacatcaaccagatcctcgaccagatgcgcgccgggcagatcgaggggcgcatcgtccttgagatgtgacctgcggggcggcgtcccggcgccgcccttgcctgtctactcgacgctgcccagcccgccttccagcttgcgccagagcaggcggatcgccgccttgcgtaccagcgcgcagcggtacaggcggatttcctgcggcacgaaccattgcggcccgccacagatcgccagctcaccgcgctccagttcgttgaccacgctcagccgtggcacccaggccacgcccatgccttgcagcgccatgctcttcaggctgtcggccatcgccgtctcgtagaccgtggtgtagcgcaggttgcgctggcgcagcagcaggttgaccccgcggccgaggaaggcgctggcgctgtaggcgagcagcggcacgctctggccgttctccaggtcgaacagcggctggccctcggcgttcaccgcgcaaaccggcagcatctcggtgcgccccaggtgcagcgaggggaagatctccgggtccatctgcaacgcggcgtcagggtcgtagaacgccagcatcaggtcgcagctaccctcgcgcagggaatgcaccgcctcgccgacgttggtggcgatcagccggctggcgatgttcagcccctcgttgcgcagccgcgcgatccactgcgggaagaagcccagcgccagcgagtgggcggcggcgaactgcagcacctcgccctgcccgccttccaggtggtgcaggtggcgcaccacctggccgagctgctcgaccacgctgcgcgcggtgaccaggaacaactgcccggcctcggtcagttccaccggcgtgcgctggcgattcaccagggtcaggccgagggcgtcctccaggctgcgaatgcgccggctgaaggccggctgggtgacgaagcgtttctccgccgcctgggaaaagctgcgggtgccggccagggcgatgaaatcctccagccacttcagttcgaggttcacgacgggaaaggctccggtaatgcgatgacacgtccgccatcataccagcgtcacatccaacattatgccgtttgtgcatgaggcagcgtttaacagcattggccacgaaatcgtcacatccttagtctagtgggcatcgcggcactggccgtgtccctctgagacaaatcccgtcatgtcccccgttgcatcttcccgtatcgagaaagacctgctcggcaccctcgaagtgcccgctgacgcctactacggcatccagaccctgcgcgccgtgaacaacttccgcctctccggggtgccgctgtcgcactacccgaagctggtcgttgccctggccatggtcaagcaggccgccgccgacgccaaccgtcagctcggccatctcccggaagacaagcacgccgccatcagcgaggcctgcgcccgcctgatccgcggcgatttccacgagcagttcgtggtggacatgatccagggcggcgccggcacctccaccaacatgaacgcgaacgaagtgatcgcgaacatcgcgctggaagccatgggccacaccaagggtgagtacaagtacctgcacccgaacaacgatgtgaacatggcgcagtcgaccaacgacgcctacccgaccgccatccgcctgggcctgctgctcggccacgacaccctgctggccagcctcgacagcctgatccaggccttcgccgccaagggcgtcgaattcgccggcgtactgaagatgggccgcacccagttgcaggacgccgtgccgatgaccctcggccaggaattccacgctttcgccaccaccctcggcgaagacctcgaccgcctgcgtcgcctggcgccggagctgctcaccgaagtgaacctcggtggcaccgccatcggcaccggcatcaacgccgaccccggctaccagaagctcgccgtcgagcgcctggccgccatcagcgggcagccgctgaagccggccgccgacctgatcgaagccacctccgacatgggcgccttcgtgctgttctccggcatgctcaagcgcaccgcggtcaagctgtcgaagatctgcaacgacctgcgcctgctctccagcggcccgcgcaccggcatcaacgagatcaacctgccgccgcgccagccgggcagttcgatcatgccgggcaaggtcaacccggtgatcccggaagcggtcaaccaggtcgccttcgaagtgatcggcaacgacctcgccctgaccctggcggccgaaggcggccagttgcaactgaacgtgatggagccgctgatcgcctacaagatcttcgactcgatccgcctgctgcaacgcgccatggacatgctccgcgagcactgcatcaccggcatcaccgccaacgtcgagcgctgccacgaactggtcgagcacagcatcggtctggtcaccgcgctgaacccgtacatcggctacgagaactccacgcggatcgccaagaccgccctggagagcggccgcggcgtactggaactggtacgcgaggaaaagctgctggacgaagccaccctggccgacatcctgctgccggaaaacatgatcgcgccgcgcctgattccactgcgcgcctgatccgatacgagatcgagcgcgcccaggtccggctgtcgacgcagccgggccgcagcgcagccgatcgaagaaggctcaccggtagagggggagtactaccccctcgacctttagggatggatacccttcatcccttcttttatacccggcgccccggcccagccgcggcgccacgctcaccggtcgagagggataccaactttccctctctacactctgagggacacggcgacctgcggtgtcccttctttttttcaccgctcaagacggcccgcagatcttccccgttgccgaggtgttgtgtggctgcgctcacctgtggataacgtccgcgtcatacgtcctacgaaggcatatcccctctcaacaccccgtcaacccttgctcccgccgctcctccgggaagaaatagggcctcaatacccgtaccccgacgctgttgccggcaaacgccgccaccaaccacaaccagccatgcaggctgccggacgcgatcccgctgaaatacgcgccgatgttgcagccataggccaggcgcgcgccgtagccgagcagcagcccgccgatcaccgccgccgccagcgaacggcgcgggatgtccaggttcggcgcgaagcgtccggccaggccggcggcgagcagcgcgccgaggacgatgccgatgtccatcacgctggtgatgtcttcccacagcggcgcggccagcgccttggcgttcgccggcgtctgccagaaggcccaggcgccgacgtccaggcccacgccctgggcgatcttcgcgccccacagggcgaaggccgacgtgatgccccaggggcgtccggcgaggtacagggtgaggaagttgagcagcgccagcgccaacgcgccccagaccagcggccaggggccgcggaggaagcgccgccaaccccgccattcggcgctcggcggggtttccagggtgccgtggcgggccttctccatgcgtaccgtgaccccggcgatgccgatgaacaccgccaggctcaacaccagcgccggtgccaggcccagttcggcgaccagcgagatcggcggcagcgacggcagggcgaaccaccagccgacatgctgggtggcgatcagcgagccgaggatgaagaacagcagggtcaccagcatccgcgcgttgccgccgccgacggtgaacagggtgccggaggcgcagccgccgcccagttgcatgccgatgccgaaaatgaaggcgccgacgatcaccgaagtgccaaccggcgagacgaaaccgctcaccggctggccgaacaggctgcccgccgccagcgccgggaagaacagcagcaccgccagcgccagcatcaccatctgcgcgcgcagcccggcgccgcgccgttcgcggatgaatacccgccaggcggaggtgaagccgaaggcggcgtggtagagggtcaggcccagggcgccgccgacgacgaagaggatggcctggcgcgcgctgaccgcgttgaacaggaacagcccgccgagcaccagcagggcgaaggcgatcaggggggcggcgagcttgcgctcgggcgcggcggaaagggcgacactcatggctactcctgggcgcgagggtgatccgggggcattctagtcagtcgcgacgacgggtccaaccagggcctcccgccgccaggccttgcgcaacgcccgcagcgcctcgtcgatacgcacctcgggtactgccgcgaagcccagcaccaggcccgcgcggtcgtctggcgcaacgctggagtcgtccatccagtagtcgctcaaggcgctgacttccaccccggcggctgccgccgcggcgatcagggcccgctcccgcgccaggctgtcgacccgcacgcacaggtgcagccccgcctccaccgccggcaacggctggcaacccggcgcctctggccagccccgcagcaaggcgtcgcggcgggcgcgggcggcgcggcgcatgcggcggacgtggcgctggaaatgcccctcggcgatgaagtcggccatgacccgctgggtgcccacctccgaatggcgtacctcgatggcccgccgctggcggaagcgctcgaccagcgccggcgggaccaccaggtagcccaggcgcaacgccgggaaggcgatcttgcagaaggtcccgacgtagagcacccggccctgtcggtccagcgcggccagcggcgccagcggcgtaccgctgtagcgatactcgccgtcgtagtcgtcctcgacgatccaaccgtcggcgcgctcggcccactccagcagctccaggcgccgcgccagcgacagggtgacgccggtggggtactggtgtgacggcgtgacataggccaggcggcagccggcaatgcccgcgagccggtcgctgcgcagcccctcggcgtcgaggtcgatcccgtgcggtaccgcgccggtcgcggcgaaggccaggcgcgccgcgcggtagccagggttttccacagccaccggatcgccgttctcgagcaacacctgggcgcacaggcggatggcctgctgcgcgccatgggtgacgatcacctgttccgcctcgcagcgcaggccgcgcgcgctgcgcaggtaggcggcgatcagctcgcgcaggcgcgcctcgccggccgggtcgccgtagcccaggcagtccgccggtgggttgcgccagaagcgcgcctgtagccgcgcccaggtgtcgaaggggaacaggtcgaaggccggcacgccgacgcggaacgctcgcggcgcgccttccggtggcggcgccagggccgccgggccgcgcggcgcgggagcgctcggggcgacggcgggggccctgcctgggatttcctgcaactcggcaacgtaggtgccgtcgcctgtgcgcccgtcgatatagccctcggcgtgcaactgttcataggcccgcaccacggtgttgcgcgagaccttcagggcctgggccagctcgcggctggcgggcatccgcgtgcggctgccgaggcggccgtcgaggatccgttcgcgcagcgcggcgtagagctggcgggccaggccctgggcggggtcgaggtggatgccggcggcgtcgaagggcagtacggtggccatggcggtctcggagggaagaaagcgccagtgtggattggacctgtggaattgaccagcaatggatcttctagcggaccatttcccggcctagtctggaggcacctttacccggacatggaaccgagccatgagcacgtccctgcagattcgtcccgtcggcgccggcgaccacgccgcctggctgccgctgtgggagggctaccagcgcttctacaagaccgagatcgccgccgctaccagcgacgccacctggcagcgcttcctcgacgccgacgaaccgatgaacgccgccctcgcctggctcgacgagcgcgccgtgggcctggtgcactggatctaccaccgctcctgctggaccgtcggcgactactgctacctgcaggacctgttcgtcgccgagggcctgcgcggcgaaggcatagggcgccggctgatcgagcatgtctacgccgaggccggcgccgctggctgttcgcgggtgcactggctgacccacgagagcaacagcaacgcgatgaagctgtacgagcgcatcgccgacaagtccggtttccttcagtaccgcaggattctctgaggcccaccatgcgcgaacccttgaactggcgccccgtcgccactccaccccacgccccgctcgacggccgcttcgtcaagctcgaaccgctcgatccgcaacgccacggcgacgacctgtgggacgccctgcaagggcctggcgccgacccgttgctgtgggaatacctggcctacggcccgttcgccgagcgcccggcgttcgacgcctggctggccggccaggcggccagccgcgacccgctgttcttcgccgtgcgcgagcggcgcacgcagcgcgctgtcggcctgctcagctacctgcggatcacgccgaaggatggcgtcatcgaaatcggccatatcgccttcggcgcgcctatgcagcgcacaccggggtctaccgaggcggtctacctgctcgccgaactcgccctcggccgcctcggctaccgccgcctggagtggaagtgcaatgccggcaacgcccgttcgatgcgcgccgccgagcgcctgggcttcacctacgaaggcaccttccgccagcacatggtggtcaagcagcgcaaccgcgacaccgcctggttctccctgctcgacagcgaatggccggcgcgacaggcggcgttcgagcgctggctcgatccttccaacttcgacgccgaaggccgccagcggcagacgctggaggcgctgcgcgactagcccctggcagggactgccggtcgctcaacggtactccggcagccagtgcaggctggccaggatgtgcgcgaccgcgttggccacgccgaacagcagcaccagcacgatcgccggcgtgccgccccaggcgcggaacagcgggctgccgaagcgcttgcgcgaggcccgcgccatcagcgccggaacgatcaccgcccagaacgccgcggccagcccggcaaaaccgatggcgtagatgaagccgttggggaacagcagcccgccgatggtcggtgggacgaaggtcagcaacgcggtcttgaagcgcccgaagtggctgtcgtcgaacctgcacaggtcggccaggtagtcgaacaggccgagggtcacgccgaggaaggagctggccaccgccaggttggagaaggtggtgagcaacgcgttcagcgaatccgacgcggtgatccggtgcaggtattccaccagggtgccgacgttgctgccgccggcgatgatgcccttgaactgctcgcgcgggatggtgcccagggtgctggcctgccacagcaggtagatggccagggcgatcagggtgccgatccacagcgaacggctgatccgctgcgggtccttgccgtagtacttcatcaggctcggcacgttgccgtggtaaccgaaggaagtcaggcagaacggcagggtcgccagcaggtagggccagtagaccgcgtccggctcgccgctgttgaacaggatcgccggctggatgcgcccgagcaggccgctgatggagaggccgaaggtaatgatcatgccgccgagcatcagcgtggtgatgcggtccaccgcgcgggtgctccaccacaccaccagcgccaccgccagggcgaacagcagcccggcgagcttttccggcagggtcacgccgaggccgctggacagggtgtagccgatgatcgagccgccgccggagatataggcataggtgaggatatagaggacgaaggcgatgctcagcccgttgaccacattccagccctggccgagcaggtcacgggtgatggtcgagaagctcgagcccaccgggtagttgaggttggcctcgaggatcatcatccccgacagcagcatgcagaaccaggtgagcaggaacaccgccaccgaccagccgaaccagatgccggacatggcgatgggcagggagaacattccggcgccgacggcggtgccggcgatgatcatcgaaccgccgagcagcgagggccggcggctgggcgtttgagctggagaggacgacacctggacttcccgatagtcagcgcctgcggcgcgacgcgccgttgggcagaggcggcattctaggcggcgcgcgcgccgggcgcaccctggcagggcaaacagccggccgacgcggcaaccgatgccgataaaaaaaggggagcatcatgctcccccagggactttaaccgtctgtcgcggtcagcccgcaatctcgatcaggatctcgcccgggttgacccggtcgcccttggccacgtggatcgccttgaccgtaccggcgatgccggcctggacctcggtttccatcttcatcgcctcggtgatcaacaccgcctggccggccttgacgctatcgccttccttcaccagcacgtcgacgatgttgcccggcatggtggtgctgacgtggcccggctcgctggcatgcttgcggccgctggcggagccggcgacatattcgttgagcggctcgaacaccacttcttccggcatgccgtcgatggacaggtagaagtgccgcttgttgtcgctcttcacgccgaccccggtgatgtcgacgcggtaggtctcgccgtgcacgtcgatgacgaactcggtcggggtgccttccgcgccggcggcggcgacgcccttgccggtgggaatcggcagcagttcctcgggcttcagggtgccggcctcacgctcttcgaggaacttgcgcccgatgtccgggaacatcgcgtaggtgagtacgtcttcctcggacttggccaggttgccgatctcgctgcgcagcttgttcagctccggcttgatcaggtcggccgggcgcacgtcgatgacttcctcgctgccgatggcctggcgccgcagttgctcgttgacctcgccgggagccttgccatagcggccttgcagatacagcttcacctcgttggtgatggtcttgtagcgctcgccggcgagcacgttgaagaacgcctgggtaccgacgatctgcgaagtcggcgtcaccagcggcgggaaaccgaggtcggcgcggacccgcgggatttcctcgagcacctcgcccatacggttcagcgcgccctgctccttgagctggttggccaggttggaaatcatcccgcccggcacctggttgacctgcacgcgggtatccacgccggtgaattcgctctcgaactggtggtacttcttgcgcaccgcgtggaagtacatgccgatctcctggatcagctccaggtccaggccggtgtcgtagggggtgccgcgcagcgccgcgaccatcgactcggtgcccgggtggctggtgccccaggccatgctggagatcgccgtgtcgatacggtcggcgccgttttccacggccttgagctggcacatgctggcgacaccggcggtgtcatgggaatgcaccaccacgtccagcggcagggcgtccttcagggccttgaccaggtcgccggtggcatagggggtgagcaggccggccatgtccttgatggcgatggagtcgacgcccatgtcggccatcgccttgccctgggcgacgaaggcctcgatggtgtgcaccgggctggtggtgtagcagatggtgccctgggcgtgcttgccggcggccttcaccgcctcgatggagacgcgcaggttacgcacgtcgttcatcgcgtcgaagatgcggaacacgtcgatgccgttgaccgccgccttggccacgaaggcgcgcaccacatcgtcgctgtagtggcggtagccgagcaggttctgcccgcgcaggagcatctgcaggcgggtgttgggcagcgccgccttgagcttgcgcaggcgttcccacgggtcttccttgaggaagcgcacgcaggcgtcgaaggtggcgccgccccagacttccagcgaccagtagccgacgcggtcgagcttgtcgcaaatcggcagcatgtcctcggtgcgcatgcgggtcgccagcagcgactggtgggcatcgcgcaggatggtatcggtgacgccggtcttcttcgcttggatggtgttgctcatgttctgctccttcccttacaggccggcgtgggccgcgatggcggtggcgatggcgatggccaggtgcgacgggttgcgcttgatcgagtactgggtcagttccgggtggctttcgacgaagctggtgttgaactggccgctgcggaattccgggttgcggaggatttcctggtagtacggcgcggtggtcttgaccccctgcacgcgcatgtcgtcgagggcgcgcaggccgcgatcgagggcctcttcccaggtcagcgcccagacgatcagcttcaggcacatcgagtcgtagtacggcgggatggtgtagccggtgtagatcgccgtgtcggtacgcacgccggggccgccgggggcgtagtagcgggtgatcttgccgaacgagggcaggaagttgttcttcgggtcctcggcgttgatgcggaactgcagggcgtagccgcgatggacgatgtcgtcctgcttgaccgacagctccagcccggaagcgatgcggatctgctcgcggaccacgtcgatgccggtgatttcctcggtgatggtgtgctccacctggacccgggtgttcatctccatgaagtacacctcgccgtcggcgagcaggaactccacggtgccggcgttctcgtagcccaccgccttggccgcgcgcaccgccaggtcgccaatataggcgcgctgctcgggggtgagctgcgggctcggggcgatctcgatgagcttctggttgcggcgctggatcgagcagtcgcgctcgaacaggtgcacggtgttgccgaaggaatcggcgaggatctgcgcctcgatgtgcttgggattgacgatgcacttctcgaggaatacctcggcgctgccgaaggccttggtcgcctcggagatcacccgcgggaacgcctgttccagctcctcgcggctgttgcagcgacggatgccgcgaccgccgccgccggaggtggccttgagcatcaccgggtagccgatccgctcggcttcgcgcagggcctcggcgagatcggcgacgttgccttcggtgccgggggtgcagggcacgccggcggcgatcatgctgcggcgggcttcggtcttgtcgcccatgcggcggatcacttgcgccgacgggccgatgaacttgataccgcgctcggcgcagatttccgccagctcggcattttccgagaggaagccatagccggggtgcagggcgtcgcagccactttccaccgccaggttcaccagggcgcgcgggttgaggtagccggccagcgggtccgcgccgatgctgtgggcttcgtcggcgcgcttgacgtgcagcgcgtggcgatcggcctcggagtagacggccaccgagcggatgcccatctcggcgcaggcgcgcacgatgcggacggcaatctcgccgcggttggcgatcaggatcttcttgatcacggaggtctccctcttcggggttgggaacctggtacggtcgatccggatattccggtcgctgcatgaccggcaggcagctcccggtcgcgcttttaccctacccccgtgagggtgattaacaaaaatcaataattattgggatagccattagaaaagctttatagtcgcccgaccgatctcggtcagagtgtgactggaatgcgtaagtcgttgatgcgtatgacattacggcagcttcaggtttttcgtgccgtatgcgagagccgctcctacagccgggcggcggaggaaatggccctgacccagccggcggtcagcctgcagatccgccaactggaagagctggtcggccagccgctgttcgagtacgtcggcaagaagctctacctgaccgatgccgccgaagccctgctgaagaccagcaccgacctgttccagcgcctggaaagcctggacatgcagctctcggacctgaagggctcgctgcagggccagttgcgcctggcggtggagtccagcgccaagtacatcaccccgcacctgttcaaggcgttccagaacctgcatccggaagtcagcctgagcctgacggtggtcaaccgcacccaggtgatcaagcgcctggccgacaaccgcgacgacctggtgatcatgtccctggtaccgcaggacatggccctggagttcctgcccttcctgaacaacccgatcatcgccgtggcgccgccggaccatccgctgtgcaacgccgcgaagctggccctgaaggacctggagcccttcccgctactggtccgcgaaccgggctccggcacccgcaaggcttgcgaggagttcttccagcaacgccgcgcgcacttctcgcagatccaggagatcgcctcgctggagtccctgcgcgaaggggtgatcgccggcctcggcctggccctgctgccgcgccatgcggcgcaccaggaactggccaacggcctgctgcgcgaactaccggtggaggaattgccgctctatcgcagctggtgcctggtgcacgccaagggcaagcgcctgagcccggtggcccaggcgttcgtcgccttcgtccgcgaggagcgggcgctgatcagccagctcgctgggcgcttcgccggccctggcggttcgagctgaggtaggcggcggctaccagctcggggtagtcggccagttcctggcgcaggcgcagttcttcgcagtggtcctcgatcgcccggcggaattgcatgcgccgctggtcttcgagcttgcggcgggttttcgaatccacgtgctgggcattggcatcgctatgacggggcatctcgcgtctcccatggccgactggctggagtcgcgagcatcgcgcagcaatgtgacggtttggcggcaagccggtgaagactgcgttatgccttcccggcggcgcctcaggacggctcgccgcgctcttcctggttcttcatcaccttcggcgacaggcgcaggctgcgcaggctgcgcttgacgctcttgaggtggttgaccaggtccgggccgcgggccatggccacgcccatcgccagcacgtcgatcaccaccaggtgggcgatgcgcgaggtcagcggggtgtagatgtcggtgtcctcgtgcacgtcgatcgccaggttgaccgtggccaggtcggccagcggggtctggctcgggcacagggtgatcagcgtggcgccggcctcgcgcaccaggttggcggtgatcagcaggtccttcgagcgacccgactgggaaatgcagatggccacgtcgctgggcttgagggtcaccgccgacatcgcctgcatgtgcgggtcggagtaggccgccgccgacagcagcaggcggaagaacttgtgctgggcatccgaggccaccgcgccggaagcgccgaagccgtagaactccacgcgctgggcgtgggcgatggcggcgatggcgcgctccagggcgtgggtgtccaggtgctcgcggacttccatcaggctgtgcagcgtggtgtcgaagatcttcaggctgaagtcggccaccgagtcgctctcgtggatcgagaactggccgaagctggcgccggccgccaggctctgcgccagcttcagcttgaggtcctggaagccgctgcagccgatggcgcggcagaaacgcacgatggtcggctcgctgaccccgaccccatgggccagttcggccatggagctgtgcatgaccgacgccggatcgttgagaacgtgatcggcgaccttgagttccgacttgcggagctgttggcgggactgggctatgtgctgcagcaggttcacaggctggactcgattctctgtagtaaccttgtagttatactacaaacagtcagccacgcccagccaacgccgtcgggagcttgccttgagtacaccagccactccaacgtcctgcgacatcctggtcttcggcggtaccggcgacctggccctgcacaagctgctgccggcgctctatcgcctgcaccgggaggatcgcctgccggccgatacgcggatcttcgccctcgcccgcagcgcgctgggcaacgccgccttcctcgccctcgccgagcgcaacgtccgcgcggtggtggcgcgcagcgagttcgccgccgaacaatggaaaggcttcgccgcgcgcctcgactacctggccatggacgcctcgcagagcgccgacttcggccgtctcgcgcggcacctgaagagcagcgagggccgagtgctggtgcactacctggcgacctcgccgagcctgttcgcgccgatcgcgcagaacctctccatcgccggcctcgccgggccgcaagcgcgcatcgtgctggaaaaaccgctgggccattcgctggactcggcgcgggcgattaaccagtccatcggccgggtgttcgacgagtcgcgggtgttccgcatcgaccactacctgggcaaggaaaccgtgcagaacctgatggccctgcgcttcgccaatgcgttgttcgagccggtctggcgcgcggcgcacatcgaccatgtgcagatcagcgtcaacgagacccttggcgtggagaaccgcggcggctactacgaccacgccggggcgatgcgcgacatggtgcagaaccatctgctccagttgctctgcctggtggcgatggaggcgccggtgcgtttcgacgccgaggcggtgcgcaacgagaagctcaaggtgctgcaggcgctgaagccgatctccgggctcgacgtgcaggacaagacggtacgcggccagtacgccgccggcaggatcggcggccaggaggtgccggcgtactacttcgagaagaacgtcgacaacgacagcgataccgagaccttcgtcgcgctccaggccgaggtcgagaactggcgctgggccggggtgccgttctacctgcgcaccggcaagcgcatggcgcgcaagtgctcggaaatcgtcatccagttcaagccggtgccgcacagcctgatcgacggcggcggcgggccggccaaccgcctgtggataaggttgcagccggaggagcggatcagcgtgcaactgatggccaagaccccgggcaagggcatgcaactggaaccggtggagctggacctcaacctggccgaggccctcagccgcaacaagcggcgctgggacgcctacgagcgcctgctgctggacgtgatcgagggcgactcgacgctgttcatgcgccgcgacgaggtagaggccgcctggggctgggtcgacccgatcctcgccggctggcgcgagcactaccagagcccgcggccctacccggccggcagcaacggcccggaacaggcgcaactgctgctggaactgcagggtcgacgctggctggaatgacgcggacattgatccggctcaggatcgcccggcgcgcgctcggctagagtcgcgcgcccacgtcgttgcgagcccgaaccatgaccgccaccaccctccgccccgaactgctgtgccccgccggcaccctgaaaagcatgcgctatgccttcgcctacggcgccgatgccgtctacgccgggcagccgcgctacagcctgcgggtgcgcaacaacgatttcgaccacgcccaactggccgaaggcatcgccgaggcccacgcacttggcaagcgcttctacgtggtggtcaacatcgccccgcacaacgccaagctgaaaaccttcctgcgcgacctggagccggtggtcgccatgggtccggatgcgctgatcatgtccgatcccggcctgatcatgctggttcgccagcatttcccgcagatgcccatccacctgtcggtgcaggccaacgcggtgaactgggccgcggtgcaattctggcggcagcagggcctgacccgggtgatcctttcccgcgagctgtcgctggaggagatcgaggaaatccgccagcaggtgccggacatggagctggaagtgttcgtccacggcgccttgtgcatggcctattccgggcgctgcctgctgtccggctacatcaaccgccgcgaccccaaccagggcacctgcaccaatgcctgccgctgggaatacaaggcggtggagggccgcgaggacgagctgggcaacgtggtggcgcgggagccgaccctgggacgcggcgcgccgaccgagcaggtgttcctcctcgaggaaggcaaccgtcccggcgaaccgatggccgccttcgaggacgaacacggcacctacatcatgaattccaaggacctccgcgccgtgcagcacgtcgagcggctggcgcggatcggcgtgcactcgctgaagatcgagggccgcaccaaatcccactactacgtggcgcgcaccgcccaggtctaccgccaggcgatcgacgacgcggcggccggcaagccgttcgaccgcggcctgatggacaccctggagtccctcgcccaccgcggctacaccgagggcttcctgcgccgccacgtgcacgacgagtaccagaactaccagcacggccattcgttgtccgagcgccagcagttcgtcggcgaactcaccggcgaacgccgcgacggactggccgaggtggaggtgaagaaccgcttccagcgcggcgacagcgtcgaactgatgactccgcgaggcaacctgagcctgcgcgtggaggacctgcgcaacgccgccggcgaggccatcgaggtggcgccgggcaatggccacgtggtctacctggcgctgccggaaggcctggacctgtgctacgcgctactgatgcgcgatctccagcccggccaggatacccgccagccgcaggccgaacgcagcggcgggtgtgccggcaagggcgcttgcggctgcgctcactgagggttgagcaggaacaccacgtagcccctgaaccaggggctcttttccaggtagtcgggggcttgccagtcgccgccctggaccaggccgatccggtacggcagttgcaggcggctgacccgcgggaggtaggcggcgtggttgggaatgctgtggcgcccctggtaggtctgcaccaccacttcgtcgaccacgcccttgagccggttgatcgccgccggctcggcgttgctgccccagtcgagcaacccggtgatgctcaagcggtattcgcggggcaggcgccggcgcaggtcgcggaggaaatcgacgtactcgtcgaggtagcgggtacgcgcatcgaagtcgatctggatgccgaccaccgggttgccggcacgcttccagcgctgcacctggttcagcacggcctggtagatctgcggcgtccagcgcagggtatgggcgcggtacaccacccagacctcgccccgcgccaggcgtggcaccgagatgccctgggcgatcagccgcacgccctcgccggggcgccggcgcgactggctgatctgtccctgcaggatgtacagcgtctcggcccgcgccagcaccggctgcggcgcgacgccgctccacagccagaaggcgccgtagtcctcggcgcgcaccgcggcctcgacggacggcaacagcggcaggcccagcaacaggcccgccagccaggctcgccagcgcctcaccagtagtacttcagttccttggcccaggagctgtcggcgtaggtcgacttgagcgtacggaaccattgcttgcgctcggcctgcgggatgtcctgctggccgcaggtgttgtagccggccggggcgaagcagttgatcgcgcggaacagcgcgtaggccttgtcttcgcgcggagccttggggttgtccatgaccaggcgatagccatccagccgggagtacacctcgcccttgaagccgctcggggtgccgcccagctcgttggcctcgggctggctgtccagcggcatgccgtcgagaccgttgcgcaggatgaattcacccaggcagttcaggcccttcgggtccttgtcatcggcggccagcgccgcggccgactcggcgatggccgggcaaacgtagccggactcggccttgtcgcccttccagcggaacagctccaggctgttaccggcgccgtagacatagccgaggctggtgcccagcttggtctgcgagggggtttcgccgagcagcgcgaagtccttgccgaagtcggcgaagcggctgcggcgcaggtccttgtaaaggagagtgaacagcgcggtatcgcgctcttccgccgtcgcgccctgcttggcctggcggcgcaacagcgcggcgtcggcgacgttgcgcaggaggatgctgcgcagcagcggctcctggaccggcgaaccttcggcgaagaccttttccaactggccgctgcgctcgtagttgagcgccagggccagctgcaactggcccttctggtacggctgcgcggcctgcggcaacagttccagccagagcgcctcggcggctttccagtccttctgctgctccagcgccagcccgcgcagggtctgctggctgaagccgacgtagtcgaggctgccgaccttttgcggcagcgcttcgagggtcttcgccggatcctggtcgacatagaagcgataggccgcctgcaggtaggcgaacagttcgggatgcgcggcgaagctggcctgttgggcctgcagcgtttcccaggtgaagctgcgcggggtcgacggatcgtgggcgcgcatctgcaccaggtcggccaccgccagcagcagcggagtctggatgtcgccgagctggataccggtcaggagcttgttgtcgacctcctggaccaggtcttccagggccatgttgcgctgcccttgctcggcttcggcgaattgcgcggcatagtcctgggccagcagcttctggtcgccggccagccaatgcacgcgccgttgcaagcccttggccgaggcggcgtagagccccttcggatacgcctgcaggtaggcctcgagggcgctgcgggtctgttccaggcgagccttgtcgacattctgcagctcggggaagcccatgtcgtcgaaggcgttctgctgggcggcgttgagcagggtgcgcgcctgcaggtacagggcggtttccttcagccagggctgcgacacgtcctgcaacgccttgaagccctgttcggcttcgtcgaagcggccgctgtagaagttggccgcagcctccaggtacgtggcgaaggccctgcctgcggccgactcgacgccttgcgcgagcacaccgcccagttcctcttgttcccagccgcaggcaccgagcagctccaggcggctgttggccagggccttggtctccgcctcgcccagcccggcgtcacgcacctggcgaagaaacgccagcgcgctgtcctggtcgttgctgcggcagcggctgccctcgccctcgaagaattcggcgccggcgatcttttccggtagcgcttcggcgcccatctgccgggccagttcggcgagcggcgagggcgctggcgcaggcggcggtgtctcggcttcgctcgccgccggaggcgcgggcggctggctgccgtcgccgggcagcaggcggaacaggccgaacggcaccaggccgtagccttcgagcttctcttcctccgacggcggcgcctccaccaaccgccagtggccggcgtcggccagcagcaggcgcaggttggcgcgggtgtcgttgcccggggcgaggaacggcaaggtatcgcagacaccgccgccgaccagcgaccaatcgggatagcaggagtcgtcgctgctggcctgggccagcggggagagaccggcgcccaccagcaggagggcgggaagaagcggcttcgagcgcatgaatcgtccttaattcgtgggagtcgaaagtgctacagcatactccgccggatcgcgttcaacgagcctggcgcaaaccttcctccagggcatgggccggcaacggccggccgatcaggtagccctgcagctcgtcgcaacgctgggccaccaggaagtcccgctgctcgatggtttccacgccttcggcgactaccttcaggtcgaggctgtgggccatggcgatgatcgcccggatgatcgccgcatcctcgctgttctgggtcaggtcgcggacgaacgactggtcgatcttcaggtagtccagcggcaggcgcttcaggtagctgagcgaggaatagccggtgccgaagtcgtcgaccgacagcttcacccccatctcgcgcaactggcggaaggtcgccaggacactgtcgagggcgtccagccactggctttcggtcaactccaactccagttgcgccgccggcaggccgctgtcggccagcgccgagcgcactacgtcgagcaggtcgccctggcgcaactggtggaccgagaggttcaccgagacccgcaggttcaggccccgctggctccactcggcggcctgcaggcaggcccggcgcaggacgaattcgccgatctcgccgatcaacccgcactcctcggcgaggccgatgaaggtcgacggcgggatcatgccctcctccggatggtgccagcgcaccagcgcctcgaccgagtccgggcgggcgctggccaggcacagcttgggctggtaatgcacgtccagctggccctcctcgaccgccttgcgcaaccgggtttccaggcgcaggcgttcgagggtgctgtcctgcaggttgtcgcggaagaactggaaggtgttgccgccgagttgcttggcatgttgcatcgccaggttcgcctggctcatcagcacggagatttcccgcgcctgctcggaaaacaggctgatccccagcgaggcgccgaggatcagctcgtggccgagcacgctcaccggctggcgcaactggaccagcaggcgttcggccaggcgcgacagggccgcggcgccggtgccgccatcgaggaggatggcgaactcgtcgccggccagacgcgccagggtgttggcttccggcgcggtgcgccgcaggcgctgggccatctccctgagcaactggtcggcgacctcgtggccgaggctgtcgttgagcagcttgaagcggtccaggtcgatcagcagcagggccagcccgccctcctcctggcgcgcccgctgggccgcctcgtgcagccgctcgcggaacaaccggcggttggccaggccggtcagttcgtcgtagtgcagcaggtgacgcaggcgctcctcgacgtcgcggcgggcgctgagatcggtgaagaaaccgacgatgtgggtcgcctcgccattgccgtcgcgcagcaggttgagctgcagccattggggatagggatcgccattcttccgcgtatccaccagttcgccctgccactgcccgtgctggcgcagctcggcgcggatctgccggtagtggcgctgggcctcgggggtattcaccagcaggctggcgttgcgcccgaccacgtcctcgcggcgatagccggtgatgcgactgaaggcctggttgaccgccagcaggttgtaggccggatcgaggatcacgatgctctcgctggccgcctcgaacactgtcgcggccagttgctgctgctcttccaggcgcttgcgcgcgctgatgtcgctgcgcgtgccgagcatccgcgtcacccgtccccgcgggtcgcgagccatggcccggccacgatcctccagccagcgccagccgccctcccggtcgcgcacgcggtactccacccggtacagctcgctgcgccccttgagatgttcggcgagggcgcgacggatacgcggcaggtcgccggggtggatgctttcgatcagcctgcgatagtcctcgggaccgtccccggcgctgaagaccgcctcgagataggaatgctggacccggccgctctccaggttccagtcccacaaccccagttcgctggcctccagggccatggccaggcgcgcctcgctctggctgagcgcctggctggtcgcgccaagctcctcggtgcgcgcctccacccggcgctgcaaggcatcgcgggcggcgcgcagctcgcgttcgaccaggcgtcgctggccgacctcctgggcgagcttgcgattgagcgcttcggcctcggcgttgacgcgctccaggtgcaggttcagcgcctgggtctggaagcgtcgcagcagcgcgccctgcaccagccggtggatctgcccggcgaccaccagcagcgccaccagcaggatcaggccgagcacgccccagccctgcaacaggctatgcggctgcaacagcaggaaaacgatggatggcagcaggcccggcaaggcgaaggtgaggaaggccggcaggctcaccgcataggcgacgctggcggagaggatcgccgccgccaccaggccgaacaccagcacctgctggaggaaggcatcggccgggaccagcatgatcaccgcgaacgccagggtcaggcccgaggcgccggcgccgcacaggaaggtccgccgccagtggcggctggcctggcgacggctgtcggcctgctggaaggcggcgacctgcagcaggcgcaggacggcgagcaacaccagccagaccagccagccaccgagcagccagctgctgaccttgccccacaccaggcaggcgctggtcacgccgccgagcagcatgagcagggtcggcgtgcgcgagccgagataaaggagccgggtacgctcgatggcaatttcgcgggcgtagagccgcagtacatcggtgctgccgcccggcagcgccaagggctcgacatggacggtcataggcgcttgttcttgtagtggtttgccttgaagtggccggagcataaccgagcaggggcaggctgcccaaggccgggatagagcatttttccgcagccaggcccgacgctgcgccggcctgcgccgaatggcggcccggtttgcccggcttttccccgccccggtagaatgccgcgatgaacgacgacctctccctcctgctgaactccctcaacgacccgcagcgccaggccgtggccgcgccgctgggccgccaactggtcctcgccggcgccggctcgggcaagacccgcgtgctggtgcaccggatcgcctggctgatccaggtcgagcacgcctcgccctacagcatcctgtcggtgaccttcaccaacaaggcggcggcggagatgcgccaccgcatcgagcagttgctcgggatcaatccggcgggcatgtgggtcggcaccttccacggcctcgcccatcgcctgctgcgcgcgcactggcgcgaggccgggctgagcgagaacttccagatcctcgacagcgacgaccagcaacgcctggtcaagcgggtgatccgcgaactcggcctcgacgagcagcgctggccggcgcgccaggcccagtggttcatcaacgggcagaaggacgagggcctgcggccgcaacacatccagcccggcggcgacctgttcctcgccaccatgctgaagatctacgaagcctacgaggcggcctgcgcccgcgccggggtgatcgacttctccgagctgctgctgcgcgccctggacctctggcgcgaccatcccggcgtgctcgagcactaccagcggcgcttccgccatatcctggtggacgagttccaggacaccaacgccgtgcagtacgcctggctacggattctcgccaagggcggcgacagcctgatggtggtcggcgacgacgaccagtcgatctacggctggcgtggcgcacggatcgagaacatccagcagttcagcgacgacttcgccgatgccgaggtgatccgcctggagcagaactaccgttccaccgcgtcgatcctcaaggccgccaacgccctgatcgccaacaatcagggacgcctgggcaaggagttgtggaccgacggcgaggacggcgagtcgctgagcctgtacgccgcgttcaacgagcacgacgaggcgcgctacgtggtcgagtcgatcgagagcgcgctcaagggcggcctggcgcgcagcgagatcgccatcctctaccgctccaacgcccagtcgcgggtgctggaggaagccctgctgcgggagaagattccctaccgcatctacggcggccagcgcttcttcgagcgtgccgagatcaagaacgccatggcctacctgcgcctgctcgacggccgcggcaacgacgcggcgctggaacgggtggtcaacgtgccggcacgcggcatcggcgagaagaccgtggagagcatccgcgaattcgcccgcggcaacgatgtgtcgatgtgggaggcgatccgcctgatgatcgccaacaaggtcctgcccggccgcgccgccagcgccctgaccggcttcgtcgagctgatcgagaatctttcggcgaaggtcatggacatgccgctgcacctgatgacccagacggtgatcgagcagtccggactgatcagctaccacaaggaagaaaaaggcgagaaaggccaggcccgggtggagaacctcgaggaactggtcagcgccgcccgcgccttcgagaacagcgaggaagaggaagacctcaccccgctgcaggccttcctcagccacgcctccctggaggccggggaaacccaggccgacgcccacgaggacagtgtccagctgatgaccctgcacagcgccaagggcctggagttcccgctggtgttcctggtcggcatggaggaagggctgttcccgcacaagatgagcctggaggaatccggccgcctggaagaggaacgccgcctggcctacgtcggcgtcacccgcgccatgcagcgactggtcctgacctacgcggagacccgccggctctacggtagcgagacctacaacaaggtttcgcgcttcatccgcgagatcccgccggcgctgatccaggaagtgcgcctgtccaataccgtcagccgcccctacggcggcacttcgcgcaacgccggcggcagcctgttcagcggcgccggggtgccggagacgcccttctccctcggccagcgggttcgccacgcgctgttcggcgaagggactatcctcaacttcgaaggcgccggcgcccaggcccgggtgcaggtgaacttcgagagcgaaggcagcaagtggctgatgctcggctacgccaagctggaagccctgtagcggcgcagcccgtggagaaggcccggaggaggacgacatgctggcatcctgggccttctgggcactgctttcggcgctgttcgccgcgctgaccgcgatcttcgccaagatcggcctcgaccgggtcgattcggacttcgccaccttcatccgcaccctggtgatcctcgtcaccctcggcggcatcctcgcggtcctgggcaagttccaagccccgggcagcatcccgccgcgcagctggctgttcctggtgctctccgggctggccaccggtgcctcctggatctgctatttccgcgccctcaagctcggcccggcgtcgctggtggcgccgctggacaagttcagcgtggtgctggtggcactgctcggcgtggccttcctcggcgaacgcctggacctgcgccaatggctcggcgtagccctggtgacagcgggcgtggtggtcctggcaatccgcccataagcccgctgaatggcgcttcgaccttggtataaaggcgaaaaatcgcggaaaccctagactggcggcctctaataattcgtcgtctgaggttcgttccatgtaccgtgatcgcgtgcgcctgccctccctgctcgacaaggtgatgagtgcggccgaagccgccgacctgatccaggacggcatgaccgtcggcatgagcggtttcacccgcgccggcgaggccaaggccgtaccccaggcgctggccatgcgcgccaaggaacgtccgctgcgtatcagcctgatgaccggcgccagcctcggcaacgacctcgacaagcagctcaccgaggccggcgtgctcgcccggcgcatgccgttccaggtcgacagcaccctgcgcaaggcgatcaacgccggcgaagtgatgttcatcgaccagcacctctcggaaaccgtcgagcagttgcgcaaccaccagctgaagctgccggacatcgccgtcatcgaagccgccgcgatcaccgagcagggccacatcgtgccgaccacctcggtgggcaactcggcgagcttcgcgatcttcgccaagcaggtcatcgtcgagatcaacctggcccacagcaccaacctggaaggcctgcacgacatctatatcccgacctaccggccgacccgcacgccgatcccgctgacccgcgtcgacgaccgcatcggcagcacggcgatcccgatcccgccggagaagatcgtcgccatcgtcatcaacgaccagccggactcgccatccaccgtgctgccgccggacggcgagacccaggccatcgccaaccacctgatcgatttcttcaagcgcgaggtcgacgccgggcgcatgagcaacagcctcggcccgctgcaggccggtatcggcagcatcgccaacgcggtgatgtgcggcctgatcgagtcgccgttcgagaacctgaccatgtactccgaagtgctgcaggactcgaccttcgacctgatcgacgccggcaagctgcgcttcgcctcgggcagctcgatcaccctgtcgccgcggcgcaacgccgacgtgttcggtaacctggagcgctacaaggacaagctggtgctgcgcccgcaggaaatctccaaccaccccgaggtggtccgtcgcctgggcatcatcggcatcaatacggcgctggagttcgacatctacggcaacgtcaactcgacccacgtcggcggcaccaagatgatgaacggcatcggcggctccggcgacttcgcccgcaacgcgcacctggcgatcttcgtcaccaagtcgatcgccaagggcggcaacatttccagcgtggtgccgatggtcagccacgtcgaccacaccgagcacgacgtcgacatcctcgtcaccgagcagggcctcgccgacctgcgcggcctggcgcctcgcgaacgggcccgggtgatcatcgagaactgtgtccacccgtcctaccaggcaccgctgctggactacttcgaggcggcttgcgcgaaaggcggccacacgccgcatctgttgcgcgaggcgctggcctggcacctgaacctggaagaacgcggacacatgctggccggctgaggctgaaccgtttcatccgcaactatttccagcgcccggacgattaattcttccgggcgtctagacagggcagaaaaaaccacgtaaaaacatatttcggcggccttttctcttgccgccatcgcaacacgccgacccggcccttccgcttttcctgctgtaacacttcgttgtttctttcggtaacgcaccatgacggtgcagagcggcacagttacgcaccgaaacaacccatacagttcggaaacacaccccggtgatccaacgcaattctccgcaactgttcctattcttgttgacctgttagtcagatcatattgctcagttaatcactagcaacctgactacccaccacaagtgggaaggatcgacacatcatggaacgtaccctcggttccaacactttcgacatcgctcgctccaaccgccgcagcagcagcctgctgggcaccatgaaactgtggcagcgccgcatccagagccgtcgccagctggcccgcctggactcccgcctgctcgccgacgccggcatcagcgaagcccagcgctacgccgagctgaacaagccgttctggcgctaagcgatactgtaacgtcccggttcggcccagcctgaactgtaccgtaggccgctccttaccgagcggccttcacgtatctggaagaagccttttcctccagcagttcacggtacagctcgctccagcgacgccccatctcttcggcggtgaacagttgccgatagcgggcctccgcgttcctgcccatttcctccgcctgctgcggatgctcccagagccagcgcatcgcttggcgaaacgcggccggctggctgggcggcacgaccaggccggtctcgccatggatattgatgtagctggtgccggtgccgatctcgctggagatcatcggcttgccgtacatcgcgccctccagcagggagataccgaacgcctcggaacgcaagtgtgacggaaagaccatggcgtagctgagttgcagcagggcgaccttgtcctcgtcgtccacccgcccgaggaagtgcacgttgcgcaaccccagcgccgcggcctgggcatacagctcggcctgcaacggcccggcaccgacgatcaccaccgggtaatcggtgccctgcaacgcatccagcaggatatgcaggcccttgtagtagcgcatcaccccgacgaacaggaagaaccgcggcccgagtttctctcgccagtgctccagacgctgtgccgcaggcttcgggtagcaggccttgtccaggccgtaggtgatcacccgggtcttttcccggtactggcggagcacgtcgctggtgctgaagtagttgggcgacgccaccgcgatccgatcgacgctatgaaggaagcgccccatcagcggccggtacagtttcaacaggacgcgctggcggatgatgtccgaatggtaggtgaccacgctcggcttgttcataccggtgaggaaatgcaccaggtccatgaacggccaggggaagtggtagttgaccacgtccgcctccgccgccagctcgcggaactgcttgaacacgctcagggaaaacccggtggaagcgagctgcaggtcgagcctggcgcgatgcaccacatgtccgccgaagggcacgacaggcggatgcgggtcgctgctcagggtcaggacgtggttgtcgatcccccacgacccgctgctctcgcaaagctggaagatcacctgttcgatcccgcctaccgtttcgctcaggtaggtcttgtagaagtgcagtacccgcattcagccctccacggcacgacgataggctgcagcggtgagattcgcgcaacgcttccaggaaaactgctccgcccgtcgcaggccggcttcccggcagcactcccagtagacggtatcctcggtcatgcggaccagcatgtcagatagcccattggcatcatccgggtcaatatagctgcccgcctcgccggccacctccggcattgcggagagtcgcgtgagcaataccggcgtgccgctggccatggcttccagcacaggcaggccgaagccttcgtagatcgaggggaagaccagcgcccgagcgcccgacatcaactcggcgacccgctcgtccggcaggtagccgagcagccgcaccgttcccgaagccagcgcctgacgcagttcgtcgtcgagcgagcgactttcccatcccggcatgccgacgatcatcagcggaaaacgctggcggaccgccgccggcagttgcccatgggcgcgcagggccagcgacaggttcttgcgcggttcgagggttcctacgcagaggaaatacccgcgcggcaccaggccatgcgcgcgcaagggctcgcgcagggactcccggtcccgcggacggaaccgcgcggcatggccgaggggcgccaccacgaagcgctcgcgcggcaggccgaaatacgcctgcgcctcgtcggcgatcgcctgcgagtcggtcaggatcaaccgcgccttttccatcccgcgcgccagccggcgttctatttcgcgcaagcgggcggcgggttgcgtcgccggataatgcaggtgggtcaggtcgtgcagggtcatcagcatcggcccgtcgaagtccagcggccagagactgggctcatggtagagatcgaccggcggccgaccgctatcgaaacgccgctgctccagccagcgtcgtgcccggtaggctccgggcaggttgcgcagccagggcgacagacgcgaatagccgggcagcgccgccgccggcaggtcgccgctccagccccagccatggaacagggaaaactctaagtccgcgtgcgcctgcaacgcacccagcaactcgaccaggtaatgtccgatgccggtccgcggcgcctggagaatccgcgcgttaaccgcaatccgcatgtactgcctcgccatgcgccggggccttgccgagggcgagcaggatccgcgcgatcagttgccgactcgcctcgtgccagccgatccagcgccattcgccgaccggtcgctcggccgggaactcgcccgtggcttcgaagcgggtgaccaggttcgccagtgtctgcggatcggcgaggtcgaagtaggccatgaattcgccgccgatctcgcggaacaccgggatgtcgctgcccatcgccggcaggccgcgctgcatggcctccaccagcggcaggccgaaaccttccacataggacgggaagaccagcgatgcggcatgggagtatgcgtactccaggctcttgtcggagaggtcgttgaacatgaacaggcgcttgttcagctccggatgctgccgcaccctttccaccagcgcctcgcacttccagccgatgcgtccggcgatgcacaaccgcgcctgcgaaccctgggcccaggcacgctcgaaggcatccagcaggtaaccgtggttcttccgcggctcgatggtgctgaccatcaggaataccggcgccttggccttgaacatgcgcagcagatcgggctcgacggaggcgccgtcctccaccaggtccagctccgaacccaggtggaaataatcgaaccagcgttgcgcgaccttctccgggccgatgcgccgcagcatctccgcgcgcacttcgtcgcggatggtctcggaaatcgcgacgtagccgtcggcggtggccgcgatccagtcgaaccagtggttgaacaccttgaccagtccggcatcgcagaattgcggatgggtcaggggaatcaggtcgtagatcaccgagacgatgcccacgccctcgctcttgaggcgttccgccagcgggaagaaatcggcgtgccaggaggagtccagcaagaccagttggtcgccggcccgatgttcgagcggggtcgcgcgcacgggtgcaggctgctgcttgccgaggatgcggtcgagcaggcgcagcggaatgctgaggaaggcgaaggcgaacaggcggcaggctacatagagaaggcgccgggcccacggcgaggaacggaacgggcggcgcttttccagggtgcgctggcccagccagaagtagttggcggctcgctccaccaggatgcgcaggcgtaccagcggcgaatgcggccgcgggtccagcggcgccaggctgtggacctgatacagggtgccgtcgagcattgccaccgggatgcactccaccgtctcgtcggcttccggcaactcgcggatgacgttgcgcaccacccgctgaataccggaattgaccttgggatgctcgaacacataggtgcattcgaccaacagacgcgtcatggagtgctctccgcggaagtggggtccagagccgcctcgccggagcggctgatatgggtttcggcgcccagccaggagcaaccgacgaagtcttcctggcggttgttgatgacatggaagaccaggccgtagtcgcgccattcgaagttgcggtccaggtgcgagtccagccgcgacaggctcagtgccaccgagtagtgccccttgcccaggcgcatgtcgaaggcgaagcggtaggtgatgcgctcgccggccttcaggtcggtgagcgccttgtccaggcggtgggtattgatcccgtacatcggctggccgaggcggtccttgatcatgaagccgaggatcagccgctcgatgtcctggcgaacctcgacctcgacttccagcgtcaccgcctggcctacctcgaccacctccagcgcgcgctgccgctggtcgaccatccgtacgtcgaggatcgctgcctcgccggtgccggaaatcgtccgcacctggccgtcggcgagcatttcctggcgcacggtctgcccctcgcgctcggcgagcagggcgttgtagtagtccatcacttcttccggccgcccgcgcatggccatccgtccctgctccaggaggatcgcggagtcgcagatggactggatcgccgagcggtcgtgggaaacgatcagcagggtggtgccggccttgcggaaactgcggatgcgctcgaagctcttgtgctggaaataggcatcgccgaccgacagggcctcgtcgacgatcaggatgtccggccgccgggcagtcgccacgctgaacgccaggcgcatctgcatgccgctggagtaggtgcgcaccggctgctcgatggcctcgccgatttcggcgaaggcctcgatctccggcatcagcgcctggatttcctcgacctgcatgcccagcagttgcccggccatgaagacgttctgccggccggtgaagtccgggtggaagcccatgcccagctcgagcagcgcggcgacccggccggccacgcggatctcgccgcaggtcggctgggtggtgccggcgatcatcttcagcagggtgctcttgccggcgccgttgaccccgacgatgccgaccgcttcgcccggctcgatggtgaactcgacctcgcgcaggatccagtgcaggtggtggcgcggagggctgaaaggcaccagccattcgaacaaccggctccagcgattgggatactgtttgtaggccttgccgaggccggatacgcgtatctgtcccatcagagttcatccaccatttcgccgacccgctggcggaacagacgcaggccgagcgcgcacagcagcagcgccagcagggtgatcggcagcaatgaaggccagtccggccattgcccgtggaggaacagctgctggtagctgcgcatcagcgcggtcatcgggttgagttcgatcagcgagcggataccctcgggcaggatgccgatcggatagacgatcggcgtcagccagaaccagaactgcaggcagatgccgaacagctggccgacgtcgcggaagaacacgttgagcaccccgaggatcatccccagtcccgccgcgaacagcacctggatcgccagcagcggcaccagcgcgagcaatgccgcgcccggcaggcgcccgctgagggcgagaaagccgaggaacaaggcgaggatgatggcgaaattgaccccggcgttgagcagtacgatgaccggcaggcagatgcgcgggaagctgatcttcttcagcaggttggcgttctcgatgaacatgctctggctgcgcgaggtgatttccgcgaacaggccccaggtcagcaggccggcgcagagatagacgctgtaggccaggccgtcgtcgacccccggcaggcgcgcgcgcatcacctgggagaagatcaccgtgtagacgacgatcatcgacagcggattgagcaccgtccacaacgcgccgaacagcgacccgcggtagcgcgactggaactcgcgcttgacgctgccgagaacgaagccacgatagccccacaaggaacgagacaagccaagaagcatcagaccaccctgccgtactggtcctcgaagcggacgatgtcgtcctctcccaggtattcgccgctctgcacctcgatcatcaccaggtcgatgacccccgggttttccaggcgatgccggtggcccgcgggaatgtaggtcgactcgttgctgttgaccagccgcgcgccatcgccattggtgaccctggccatgccttgcaccacgatccagtgctcgctgcggtgatggtgcatctgcagcgacaagcgctctcccggcctgaccacgattcgcttgatcttgaagcgcggcccctcctcgaggacggtatagctgccccagggacggttgacggtccgatgcagccgataggcctcgtgccgctcgtccttcagccgctgcaccaccctgcgcacctcctggacccggtcggcgcgggcgatcagcagcgcatcggaagtatccaccacgaccaggtcgtcgaccccgaccgtggcgaccaggcgcccgtcgctctgcacgaaggtgttacgggtgtcgacgaacagggtgtcgccgctgccgcgattgccctctgcgtccgcgtcgagcagcgcgctcatcgcgccccaggaaccgatatcgctccagtcgaaggccgccggcaccacggcgacccgcgcggagcgctccatcagcgcatagtcgatggaaatgtccggcagcgcggcgaaggcttcgcccgccagctcatgctggatgccatcggccatcttcaccgccgcactggcggccaggcaggccctggcctgctccagcagggccggggcatgctgcgccagctcgtcgaccagggtcgaggccgtgaaacagaacatcccggagttccacaggaaaccgccactttccacgtagcgacgggcggtttcctcatcgggtttctcgacgaagcggcgcaccttggccgccccctgctcgtccagccggtcgcccagctcgatatagccgaaaccggtttccgctgcgtccggcaccacgccgaaggtaaccaggtgcccggcgacggcgagacgcgcggcatgccctaccgcctcgcggaaggcctcctcgttgcggatcaggtgatccgccggcatcaccaccagtaccgccgcgtcgccatgttcggcttgcagcgccagggcggcgacggcaatcgccggagcggtgttgcgtccggtcggttcgaggatgaaatgtccccgatgccgccccaggcgggccgcctggaactggtccttgctctggaagtaatgctcgcggttggtcaccgtgacgatttcgccatgcccggccaggagcccggcggcacgtcggtaggtcttgcccagcagggtctggccatcgggcaggcgcatgaacggcttcggctgtccttcacgcgacaccggccaaaggcgggtaccggcgccgccggaaagcaccacgggaatcagcatggcttactcccgggaaacgcgtcgcaggtccgcctcgaccatcatccggatcagctcgtccaggctggtcctgggcttccagccgagcacacgctgggccttggccggattacccagcagcacgtcgacctcggcgggccggaagaacgccgggtcgatcttgaggaagtcgcggtagtccaggcccacatgctcgaaagcgatctggcacatgtcgcgcacggtggtagtgacaccggtggccaccacgtagtcgtcggccttgtcctgctgcaacatcagccacatggcttcgacgtagtccccggcaaagccccagtcgcgcttggcgtcgacgttgcccaggcgcaattcctgctgcttgccgagcttgatgcgggccaccgcgtcggtaaccttgcgcgtgacgaactcgatgccgcgcagcggcgactcgtggttgaacaggatgccgctggaggcgtgcaggccgaagctctcgcgatagttgacggtgatccagtggccatagagcttggccacgccgtaggggctgcgcgggtagaacggcgtgttctcgtcctggcgctcggcctggatcaggccgaacatctcgctggtggaagcctggtagaagcgcgtttccgggctgaactggcggatcgcctcgagcaggtgggtcacgcccaggccgtcgacgacgccggtggtcaccggctggttccaggaggccccgacgaagctctgtgccgccaggttgtagacctcctgcggctgcgccttgatcaccgcgcgctgcaccgaacaggcatcggccatgtcgccgtcctcgtactggatatcgccttcgatccccagttcgcgcaggcgccagcgcgtgtcgctgctgcgccgcgccaccaggccgtggacccggtagcccttctccagcagcagcttggccaggtacgctccgtcctgaccggtgatcccagttaccagtgcacttcttgtcattcttctcgtacccgtgactcccagtcggacaggatcgcccgcagggactgttttatggttatttcaggcttccagcccgtggtgtcgtgcagtcgcgcatggctgccgcgaacccgccgctgttccgcccggcgcatcctggcagggtcctgaacgatttccagctcgacctgggcgatgtccgccagcagttcgatcagctcgcgaatcttctgctcctgcccggaacagacgttatagacggcgcccgcctcgccgtgggagagcaggcgcagataggctgacagcacgtcctggacatcgaggaaatcacggctgacgtcgatgtcccccacttccagccgattggcctgcaagccctgcttcatccgggcgatctgccgcgcggcgctggcgatcacgaagctgtccttctgccccggcccgatatggttgaacggtcgcgccaccagcacccgccagccttcggtgataccccactgcaggcacagcgactcggccgccagcttgctgaccgcatagggattgcgcgggtgggggatgagttcctcgtggatcggcaacgccgcctcggccacctggccgtagacgtcgccggagctgatgtacaggaaggtaccggagaaaccccgcgccttaagcgcctggagcaggttcagggtgccaaggaggttgatctgcagggtccgcgcaggatcgcggaaggcctccggcacgtaggtctgcccggccaggtggatgaccgcatccggcagctccggccagaggtcgcccagcgaatccggctccagcaggtcgtaacgatgcggtacgggaaggagcgcccacggcgtgtgggccgctgccagataagcttgaagatgcttgcctacgaaaccggagagcccggtgacgaacagacgctgagtcaaggaagcgggccttttatctgatgctacgctcggcgacgctcttcctaggaatacgacgttccagaggtcatgccggatagcgtgttgttctgattatcgcgctccaatctgtgccaagaatgcgccgatttcaaccgcttattcgtgaccggtaggttctcattcgaacggcatgacgttttctccgtcagccttcacgtttttgcgaaaggtatgtttagaatgcctctcgatttcgtgcttgactgcctcctgttctgttgatcgaacaggtcgcggtcgcgataacagaacaagaacacgatgggtcgaccagtccgccgggaaggcttccggacaacgaagcagcgcctggcctcgctcatcaccaccaagctgtcgaacgggcagtttcatcacgagatgccatgaatttcatcctttactcggatatcaacgagcgctcgatcggccacaacctcggtcgccccgaatacagctactacttcgtcctcaaggcctaccggccaatcctcgaatcgctgggacaggtccacctggtacagagcacggacgaagtcgacccgctctaccggcaactgcatgaacagggcgaagactgcctgttcctctccttcaccccgccgcacaaggcggcgcggggcctgcaatgcccgatgctgtgcgtggtcgcctgggagttcgagtcgattcccgacgtggcgtgggacggcgatccggcgcaggactggagccaggtcctggccggccatggcgcagccatcaccctctccgagcagactgcccgcgcggttcgccgggtgctgggcgaagactttccggtactggcgctgccgacgccgatctgggaggacttcgccgcgatccgccagcaaggcgaacggaatccggtcaagtccggcgagaccctgcaactcaagggctgcgtcatcgacagcctcctgctgggcctttccgccgacggcctcatcgcaccgatcagggaagagaccgaggacgagatcctcgaggtcctccccgagacgcccgccgagcccgaaccggtccctgagccagaaccagagccagagccggttcctctcgactggaggcgccgactggtcatcagcaagcactacctgctgctgtggtaccgggaagccgtcagcgacctggtacccataccggtacgccgctggctgttccgtcacctgcgccggccgctgccgcccccgccaacggcgctggaaacgctgccggagccattgccccaggccatcgagccgatgccgcccgccgagcccgagcatccgccggcgctgttgccggccgtcgaccagcaccagcaggtcgtcgtggacggggtggtctacgtctcggtgttcaatccgctggacgggcgcaagaactggcatcacctgatcaccgccttctgctgggcattccgcgacaccagcgatgccacgctggtgctgaagatgacccagagcgacctgacgacctaccacgtcgaactgctcaccctgctttcccaactgtcgccattcgcctgccgggtcatcgccctgcacggctatctcgatgccgcggagtacgcccgcctgtacggagccgccagctactacgtgaacgcctcgcgctgcgagggcctgtgcctgccgctgatggaattcatgtcctgcggcaccccggcgatcgctccggaccattcggcgatggccgactacatggacgcccaggtgggcttcgtggtccgctccagccaggagcccgcggcctggccgcaggattcgcgccggttgtacagcacccggcgctaccggccgagctgggagtccctgaaggaggcctacctggagagctaccgggtagcccgggaacagccggagcgctatcggcaactgtccgccgcggccaaccaacgcatgcgcggctactgcgccggcgacgtggtccgccagcgcctggaacccttcctttccgcccgcaaggcaacccctgcgcccggcgtcgaactggcggccaccgccacaggcaacgttccatgctgatcatcatccactccgagaccaacaagaccaccatccggcagaacctcgggcgcccggagtacagctattacttcgtcctcaaggaattccgtccgctgctggaagagatcggccaggtggtcgaagtcagcgatcccgacgaactggtggaccgcctctaccacgactgccgcaagcgcggcgaaccctgcgtcttcctctccttctcgccgccccatcgcacgccgatccaccatgcctgcccgaccatcccggtgttcgcctgggagttcagcaccctgcccagcgaaacctggcacggcgaaccgcgccacgactggcgacatgtgctgcgccacagcggacgggccatcacccactccagcttcacggtcgacgtggtgcgcgccgccatgggtcgcgactacccggtactgagcgtgccggcgccggtctgggatcgcttcgccaaccgcgcctcgcagcaggcaggccgtcccgaagcccgggatgtgcgcctgcgcctggacggcctgctggtggacagccgccacctggacctggccgtccatgccgaccccgagccgtcggcggaggtcctggccctgccggaccgcgcggcgaaacaggtcgagctgagcctcgacggggtcatctacacctcggtgttcaacccctacgacgggcgcaagaactggcaggacatgatcagcgcgttctgcgccaccttccgcgacgagcccgacgccaccctggtgctgaaactgacccaccacaacgtcggcgaagcgctggccgacatgcttcaccacctgtacaagaaccagtcctaccgctgccgcatcgtgctgatccacggctacctcgccgacccggactacgagcggctggtcgaggccaccagctacgtggtgaacacctcctacggcgaaggccaatgcctgccgctgatggaattcatgtccagcggcaagccggccgtggctccgcgcaataccgcgatgatcgactacatcgacgccgacaacgccttcatcgtcgactcctcggaagaagccaccgcctggccccacgacccgcgcgcggcctaccgcacgctgcgctacatcaccgactgggagtcgctgtgccgggcctaccgggccagtttcgaggtcgctcgccaggagccggagcgctacgcacgcatgtccgcgcatgccagcgccagcctcgaacgcttctgcagccgcaagctggccgtggagcgcctgcgccgcttcctcgacgaagcggcacaaggcgaccccgccgccttgcaaagcatcccggcatgatccgcgccctgctccaacgctggcgttcccgtcccgctgcggcgagcgaaccggtgtcgccacgcatgtgcggtctgcgcgatgcggtgctggatggctggttccgcagcgaaaccggcgaactgctcgccggcttcgccatcggcgcccaggacaccctgctcgatctcggctgcggcgaaggcgtcgccaccctcttcgccgcccgccagggcgcttcggtgatcttcaccgacagcgaggaggacaaggtgcggagcctggcgcagcaggtcgaggcggtggcccggcggcccttcaccggcctggtcagcgacagcgatccgctgccgctgcgcgatgcctgcgccgacaagctggtgtgcatggaagtgctcgaacacgtggccaacccagcgcgggtgatggacgaactcgtgcgtctcggccgccctggcgcgcagtacctgctgagcgtgccggacccggtcggcgaacacctgcagcagggcatcgccccggccgactacttccgggcgcccaaccacatccacatcttttcccgcgacgacttcgcgcgcctggtgcaggacgccgggctggtcatcgagcaccgccaggccagcggcttcttctgggtgatgggcatgatcttcttctgggccagcgaacgggccgccggccgtgagctcggcggcgccgtccgcgaccgtatccagccgccctacccggcgctgatggaagactgggcacggctctgggaaaacctcctggcccgtcccgacggcctggagatcaagcacctgctcgaccacttcatgcccaagagccaggtgatcatcgcgcgcaagccgctcgaccgcggatcgtcgcggacatgagcggcaaacgcatcctcgacatcgaactgttgcgcgggctggccgtgctcggcgtggtattccaccatctgcacggcaacctgttcagcggctccccggcactgctggacggcatcaaccagcgcgtccagttctggtggggcgtggacctgttcttcgccatctccggcttcgtcatcgcccgcaccctcatcccgcaactgcgcgaggcgcccacacgccaggcattctgggaacaggcgcggtacttctggatccgccgcgccttccgcctgctgccctcggcctggctgtggctggcgctgatcctggcctgttgcctgctgctgaaccgctccggagccttcggcagcctgtcggccaacctcgcggcaagcctcgccggtttcctccaggtcgccaacttccgcttcgccgacagtttctaccgctacgaatacggtgccagcttcgtctactggagcctttccctggaggaacagttctacctcctgctgccgctgctgatcctctgcctgcgtcgctacctgggctgggccctcctggcgctggtgctggtccagttcttcagcctgcgcacgccgctgctgatggtattgcgcactgacgccctagccatcggcgtactgctcgccctcgcctccctgcagcctggctatgcccgctggaacccgaccctgctgggccgcgcctggagcgggccgttgctgctggccgccgtggccgcggccctgggcgtgctggccagcgaagcgtacagcctggtcgccgtgcggatcggcgccatcgcgctattgtgcggactgctggtgtggatagcctcctacgaccgcgactacctgctctccaacgggccgctgaagcgcttgctggtctgggtcggcgcgcgctcctatgcgatctacctgatccacatcccggcgttctatctcagtcgcgaactctgcttccgcctgggctgggacgccggcgagcggcccctgtcgctgctcggcaccagcctggtcctgatcgtcgtactcagcgagctcaactaccgcttcgtcgagagcccctgccgcgacctgggctcccgcctggtcaagcgcctgagcgccgcccgccgcgtcgccaccacttccggagccacctcatgctgaacttcctcaagaagatcgtctcgccgcccagccccgccaccgagcccgtcgccgcgccacccgcccccgcgccggtcgacccgtacatgctcgggttgcgcgacgcggtgctcagcggctggttcaaccaggagaccgacgagctgttcagcggctttccgatttccgccgaggacaccgtgctcgacgtggggtgcggcgacggcggcaacgttcatttctgcgccatgcgcggcgctcgcatcatcatcgccgacatcgacgcggaaaagatcgccaggacccgcgagcgcctggccgataccccggcccgcgaactggaatgcctggtcagcgactgcgacccgttgcccctggctgacgccacggccacccgggtggtctccaccgaggtcatcgagcacgtcgacgatccgcggcagttcctcgccgagctggtgcgggtcggccagcccggcgcactctatctgctcagcgtgccgcatcccacgtcggaagacctgcagaaagacttcgccgccgacgaatacttccgcaaacccaaccacatccgcgtgctcggcgaggagcagttcgccgcactggtgcgcgaagccgggctggaaatcctcagccacagccgctacggcttctactggtcactgtggatgctgctgttctgggaggccaaggtcgatttcggcaatcccgaccatcccctcctcgaacactgggccaggacctggcaggcgctgctcgactcgccgcgcggcccggccatcaagcaggccctggacgccgtggtcgccaagagccaggtgatcatcgcgcgcaagcccgcccaggcgtagaaccaccggaacagttccgctacagccgggcggaacagttgccggggccaccgaactgttccgtccaactcccgcgtggttgcccctgagcaagccagcggtcccggcgcatcatgaggttccacaccccgcccccatccccgggatgggaaggaacgcacgatgaggacatccccgcacccgcacgccgggagttccagcggtctcccggccgcccatccacatctcgccgccctgctggaaaaattgaattcctggcgacaaaacgctcgatcgcgcaagcatcttgcgcaaatgtccgaacacgacctcgccgacctggcaatcagcccgagcgaacgctacgtagagatttcgaaacctttctggcgctgagccgctggtgacgtggcgcacagttggttagtctcagcgttgacacggccgcgcggatgcggccgtctacgctgacttcgttcggagcaactcacatgaaacgtctgcgcctgatcggtgccgctgccctgctcgcctgcgcctccagcgcgttcgccagcagcttcgtggtcaccacggataccctggtccgcgccaccggcatgacctccaatgccacttcggacatcaccaattccttccgcgacgacaagatcgtcctcgaagcgcgcgacgacgccgccagcttcgtcgccagccagggcgacatccgcggttcgcacctggaagccgcactgcgccacatccgtggcaagctgccgagcctggccgccaacgacatgcaactggcccaggcgatcctgaccatctgagtcgcccgccccgccgccgcagccgcccggctgcggcgatgacctggccgaccggccacactggctccgcgccgcacattccgttagccttggcggctgttccagtcctattccgcccaaccccatgcgttaccggttctcgttgctcttctgttgcctgctggcgcccgctgcgcacgccttcgataccacgacggcgttcaccgcgaagtccctttacgtcaccagcaagctgaccagcacgccgttcgagaacaaattgttacgcgatgcccggggcgatgcggccagcttcgtcgccagcgatggcagcatccgtggtgcgcgcctggaagcggcgctgcgctggttgcgtgtcgcgcaccccgagctggcggccagcgatcaggaactggccgaagcaattcttgcccaataggcgatcaccaccgttccggagaacctccatgcgccgtagctccatgcgtcatagccccctgttcgccgccctgctgctggcgctctgcgccacggccgcggaagcacgctcggtggtcgcgaccagcaatatcatcgtccgcgccctcgaccgcagcatcgacttcacttccgacaccaccacttccgtgcgcgacatgaaagtggtcaccgaggcgcgcgacgacgccgccagtttcgtcgccagcgacggcgccattcgcggcgcccagctggaagccgcgatgcggaccctgcgcagccgtctgccggaagcccgggaagcctccgaccaggtacttgccgaagccattctcgccctgtgaggaaggcctgcgcctggctgctggcgctggccctctgcggagccggcaacgcgacggcggccctgcgcctgaaactcgacgcgcctgaactggaccctgcgcagcgcgaggccagccagcaactcttggacgaagccgcggacaagttgccgccggccttccgcgaacgcctggaccgcgagatcgaggtcgagtggcgcgacgacctgcccgccaacggcatgggccaggcccgtggcccgcagcgcatcgcgctgaaccgcaagtacctggccgatctcaccgacggcagcgccgccagccgccagaccgggcgcgtgcacggcaccgagcggcgcgagctgctggcgaccctgctgcacgagctgacccacgtctacgatcgcgcgcgcctgtggtcggcggaggaaaaacgcgagatccgccgctgcacgcgccaggaagaaaccctcggccggatcgcccagcccaccgattgccgcgggcagagcggtcgccgcttcacgctctccgacgacccgcgcctgctcgatctcgccggctggccgcagcgcgccggccagcgcgggcggcgcgaggcgcacaatggcttcgtactgcgcagcccggacgtctacgagctgagcaatccgcgcgagttcgtcgcggtgaacatggagtacttcctcctcgatcccagctacgcctgccgccgcccggcgctctaccgctactaccagcaacgcttcggctgggcgccggaacacagtgcctgtgcgcagagcttcgcctacctcaacgccggccgcgacttcggccagcagccgctgggccagctcgaccccgagcgggtctacgaggtcgactacctgctggccgaggccaacgacaacctggtcagccgctggggccacaccatgctccgcctggtgatctgcgcccccggccggccgcgtgggccggactgccggctggacctcgaccagcatctggtgctgtcctaccgcgccttcgtcggcgacctgcaattgtccagctgggacggcctgaccggcgcctatccgtcgcgcctgttcgtcctgccgctgtcgcaggtgatcgaggaatacaccaaggtcgagctgcgcagcctcgcctcggtgccgctgaagctggaccgcgaggaggtcgccagcctggtcgagcgcgccgcgcagagtcactggagctacgacggtcagtactacttcatctccaacaattgcgcggtggaaaccctcaagctgctgcgcagcggcatcccccggcgaccgctgcaaagcctggacagcatcaccccctacggcgtgctcgagatgctggagaaccgcaagctggccgatcccagtgtgctcgacgaccccaaggaagccctgcgcctgggctaccgcttcgactccttccgcgaccgctaccaggcgatgttcgacgtgctcaagcagcgcctgcacattccccaggacaaggtcgaggactggctggcgctgccggccagggagcgccagccctggttcgccaaggccgacctgcgcgccagcgcggcgctgctgctgctcgagcaggcctcgctgcggcgccagctgctgctcgcccaggacgagttgaagcgcctgtacctcggccatctggacaagccggccggcgaccagcgcctggaagtggccggcaagaccttccagcagatcctcgacgacagcggcttcctcagtcgtccggcggaactcctggagggcggctacggcctgccgcaggccgccgagtggaagcacctggaagagcagacccgcgaacgccaggcgcgcctgcgccggctcagcgacgacctcgaccgcgaggtccgcgccctgctcgatcccgagcgccgcgccgagctggaagccaacgaggccaacatcaaggaggtcggcgcgcacctgcgcgagctgcacaaggcggccggcgggctgatgctgccctgagggaggcgcctgcaggacgcatggtcccgagcgctctttcagcgcctcgcagacggcggataacgctctgcgttattcgccctacaggtgccacctccggtcttcgctcacgggtcgtccgctccggcgatgaactcctcgtcctcttcgggcaactgcgggtcgaggtgtagccatggcaggcggctgccgacccagatgtgccggttggcgggggcgcgctcgggatggtcgaggctggccacggtgaagtccagggtatcggcgctgagccgggtgaacaacgccaggttggccccgcaacgcgggcagaagtagcgcgtgcagctggccgacgaggcatattccgccggttcgcccgccagccagcggaacgccgcgcgcggcaccgtggcccaggtggtgacgatgccgcctgtggtgcgccggcagatcgagcagtggcagtgagcgacatcgtccagcggcgcggcgacggcgtagcgcagatagccgcaatggcaaccgccggtatgggtctcgggcatggcgaatcctcctcgcgggagtgccagcataagccggacttgccctgtgccgcagccacctcgcaagatgagcggattccactatccgggggtgcccgtgaccgctctgctctactccctctggccgctgttcgccctcatcgtcggcggttacgccctgcgccgctgggactttcccggcgaagccttctggcctgccgcagaacgcctgaactacttcatcctgtttcccgcgctgctgttcagcaacctggcgaccgcgccgctggacgaccccggcctggcccgccaggccctggccgtactgctcgggctcggcgtcgcctggctcgccctgctgctctgcaagcgctggcgcggctgggacgccgggcgcttcggcgccatcgcccagggcgtattgcgcttcaacacctatctcggcctggccgcggtcggcagcctgtacggcaagccgggcctgaccctggccgcgctgatgctggcgctgatggtgccgacggtgaacgtgatgtcggtctgggcgctgaccgccgagcgcggcatcagcctgcgcgcgctgctgctgccgatcctgaagaacccgctgatcctcgcctgcctcgccggcgcactggtcaacctggccggcgtcggcctgcccggcggcagcgatcgcctgctcaacctgctggcggtggccagcctgccgctgggcctgctgtgcgtcggcgcggcgctgaaaccccaggaactcggcggcgaagtcgcggcccttggctggaactgcgcggcgcggctgctggcgatgccgctgctggccttcgccatcgctcgcgggctgggcctgccgagcatggaaagcgccgtgctggtactgttcttcgccctgccgacggcgcccaccgcctatgtgctgacccgccaactgggcggcgacggccacctgatggcgggcatcattaccttgcaaacgctgctttccggcgccactctggtcggcgtactcctcgtgctgcaaggaagcccatgacgacaggacgcgtcgccgccgccctcacggcgctctgcctgctctgccaaccggccttcggtttcatcaaggtgtttcccgaattcgacgacgaacccggcgccgccaccttcttctgggcggccgtcaccaccgtcggcccgttcatcggcagcaccgtcagcgcacaggagtccagcgctgacgagggcgacaagctcgtccaggcgcgggacgacgccgccagcttcgtcgccagcgacggtgcgatccgtggcgcgtacctccaggcagccttgcaggtcctgcgccaagccccggaatacgccgggtacagcgacctgcaactggccgcggcgctcctcgcgcggcagccctgatcgaccatatatccgaaattacccgcacgtttcccgccgttatccagcgaaagctgcctgaaagcttcccgccgtagcatccgcccaccaccggcagaagaccggacacgacggcgcgcccacgagacgcccgcttacccgtacaaaaacaacaatggtgattgccatgccccgttccgcacacgcctacagccgcactccgtccgcgcgacgccacccgcccgccgcctgctgaccgcacgccgcacgcccgtccgccgtcttccccggagtgaacccatgctgaccctgctcgccttcgccatggtggcgaccttcatgttcctgatcatgaccaagcgcctgtccgcgctgatcgcgctgatcctggtcccgatcgccttcgccctgatcggcggtttcgccgccggcctcggcccgatgatgctcgacggcatccgcaccctggcgccgaccggcgtgatgctgatgttcgcgatcctctacttcgccatcatgatcgactccgggctgttcgacccggcggtgcgcaagatcctccggctggtcaagggcgacccgctgaaggtctcgctgggcaccgcggcgctggcgatgatcgtctccctcgacggcgacggctcgaccacctacatgatctgcgtggccgccgtactgccgttgtacagccgcctgggcatgagcccgctggtgatggcctgcctgatcatgctctccagcggcgtgctcaacatgaccccctggggtggccccaccgcccgcgcggcgagtgccctgcacgtcgacccggcggatatcttcgtgccgatgatcccggcgatgatcgccgggctgctggcgatcttcgccatcgcctggatctacggcaagcgcgagcgcgcccgcctcggcgagctgcacctgcccaccgaccatgaggacctggcggagatcagcgtgtcgcagtatccggaggcgcgccggcccaagctgctgtggttcaacgctattctcaccgtggtcctgatggcgaccctgatcgccggcctgctgccgatgccggtgctgttcatgatcgccttcggcatcgccatgatcgtcaactacccgtgcatccaggagcagaagaagcgcatcggcgcacacgccgagaacattctcgcagtggtctcgctgatcttcgccgccggggtgttcaccggcatcctctccggaaccgggatggtcgacgccatgtccaagagcctgctggcggtgatcccgccggcgctgggcccatacctggcgaccatcaccgcgctggtgagcatgccgttcaccttcttcatgtccaacgacgccttctactacggcgtcctgccgatcctcacccaggccgccgccgaatacggcatcaccccggtggaaatggcccgcgcctcgatcgtcggccagccggtgcacctgctcagcccgctggtgccctccacctacctgctggtggggctggccaagatcgacttcggcgaccaccagcgcttcaccctgaaatgggccgtgctggtgtgcctggcaatcctcgccatggccctgctgctgggcctgttccccctgttcagtaactgaccgagacgagtgaccgcttcatggaatggctgaccagcccggaaatctggattgcgttcttcaccctgaccgccctggagatcgtcctcggcatcgacaacatcatcatgatctcgatcctggtcgggcgcatgccgaagcacctgcagccacgcacccgcttcttcggcctggccctggcgatggtgacgcggatcctgctgttgctgtcgatcacctgggtcatgcgcctgaccgccgacctcttccacctgttcggccagggcatctccggacgcgacctgatcctgttcttcggcggcctgttcctgctctggaaaagcagctcggagatctaccagggcctggaaggcgaggaagaaagcggcgatgaaccgaaggggtcggcgggcggcttcatcggcaccatcatccagatcgcgatcatcgacatcgtcttttccctggactcggtgatcaccgccgtcggcatggtctcccacgtgccggtgatggtcgcggcgatcatcgtcgcggtactggtgatgatgctctgcgccggcgccatcagcgacttcatcgacaagcacccgtcgctgaagatgctcgccctgtcgttcctcatcgtggtcggcacggtgctgatcgccgaagccttcgaagtccatgtgccgaagggctacgtctacttcgccatggccttctccctggccgtggaggcgctgaacatccgcatgcgcggcgccgccgcgcgcaagcggggcgaagagccagtgaagctgcgcaaggaagtgctcggcgactgagccgctcaggccggctcgaaacgctcgccgcggaatacccggcgagccgcgccgcgactgatccgaccgtgggcccggcggcgctccgcgcgcagcgcgtcggccgcgctgctcgcctggtccgcgaggcgccgggcgatcagcaggatcgccaggcgtttgttggcgtgctggctacgctggctctgcaccctgacgctgatgccgctggccaggtgggtggcgcgcaccgccgagtcggtggtgttgacatgctggccgccggggccggaagagcgcagggtctcgaaacggatctcgccctccagactggccggcggcgcggcgaagcgctccgcgccgatgaaccagttcttgcgcgcatgccttgcccggtaggggctggggcagatccactggataccgccgcaccagcgctcggcgagcgcttcggcggcagtgccgcgcagccccaggagcagcgaacgccaggtgcgcggacgctcgccggccacctcctcgattacctcgacctcgacgccggcttgcgccgcctcgaggcacagccgctcgaacgccttcgccaccgccaggcagcattccgccggcccctgggccgcggagagttgcagcaggatcatcggcagcactccccacgggtcttgtaggtcagcaccggcttcaggcgggcgaccaggcgcagcaggccggcttcgagcagcgcgccgaccaccgagtcgatacccttgtaggcttccggcgcttcctcgtagatcagttggcggtcgccacagatcaccctgctgccaaggcgcgtacggcccaactggtcgacgctgaagcgcgccgccagacgctcccgacactcgccgcgctgccatttgcgaccggcgccgtgggccagggagaacaggctctgcgcgctcggcacaggctccaccaggtagctgtagtcgccgcgcgagccggggatcaccagcacgccctggtcggccggggtggcgcccttgcggtgcagccagccgtcgacgccatcgacctgtgccggcgccaccaggttgtggttgatgtcgagcagttccaggccgtcgcagcgcaagcgttcgagaatgcgccgggcgatgagctggcggttaccctcggcgaagcgcagcgcatcggcgtggcgcgccaggtaggcggaagcttccaggctgccgtcgagcaggccggcgtggccatgcaggctgacctgctcttgcaggatcgcctggccgagaccgcgcgagccactgtgcaccagcagttgcaggcggccggcatcgaggccgagggcgtgcagggcggcctggtcgaacacggtctcgacctgctgtagctcggcgaagtggttgccgccaccgatcgtgccgagcgcgcgccagtgctcgcgggccggtagatccagggcttcgatgcagtcgctccaggtctcgtccagcggcaggtcgagattgcccaggcgcttttccagtttgtccgccgacagcttgccgggggccaggccggtttcccacagggccatgccacagccgatgtcgttgccgaccagcgccggatagaagcgaccgacggagaagaacgccgcgccgaccggatagccgcggccgggatgcaggtccgggagaccgacgacgcggcacatgccgtccagctcggcggtggtttgcagttgctggatcgccttgccttcgatccaggtgctgtccgaggcgatcagtgcgacgcccgcggacaaaggcttgatgtagttgcccataatccaatccatgtgattgaaacggtagatccggggggcagaccgaagccgagcgggcactcgcggaagggcgaagggcgtctaacggagaagtgaaaacctggggagcggtgaccgcggcagccgatgacctctcgccggaagcttgcgcggacgcaagggcgggaatcgttcagcggtgcagggggtcgagcggtaggtttcggtggccgttaggccaggcgcagcctgcaaagggtagagaactgaatcatcgatgtaacctcctttgcggtgcgtaagtgggggaaatgaagggcgaatcctaggcgtttcattcccaccgcgcaagccccggaaaggcttcgcgatggaaatgagcggcgcatcactgcgccgaaagagcctgcacggcgccgggcacctcgctgttccagcgctggtagagcgcccgcagctcgccggacgccgccatttgccgtacccgcgcgtcgtagacctcgcgcaggagccggccgctggcgctgtcggcgaaggtcatgaaggactccttgccgggcggtagttgcgcgatcgggtaggcgtcggccggcagatgcgcttcgctgcgctgcttttccagttcgtccggctcgtcgaggaagaaatccagctcgccgttctggacctgctcggtgcaacgctcggggcggacgcactcgaccagggtgaagtcgcgctgctccgcggggatcaggttgtagctgtggcgccagccgacgcgcttgccggtgaggctggcgcggccggagaacggcgtcttcgccgcatgcatcacgccgtggtactcgatgtcgatcggcaactgggcgtacagcttgccctcaacgccggggatctcgcccggcacgccatcgaccatggagcccgcggtcatcagcttgttggcgcggttccagggcatgttgatgaatttcacgtcgagcccgtagggcgcatagacctgcttcagcaggtcccagtacagaccgctgccgtcggcgttggtatagccttcccaggccggcgcggcgaaggtcgccttgcggatgtgcgcctgctccaggctatcgcccagcgcatcggcctgaaccaccggcgctccccctaccccgagcgccaacaccgctgccgagaggcagccactgatccccgaaaatcgcatccgcaccactcctctgtatccctctagaccggggctttttaaaaggtgcaaaggatacccttcctgtcggctaattccatggcctgtggcgcaaacgcatgcatcgaacggaaggcgaaaaaatcttcgccgtttcccggcgcgcacgcttgaatgaagggtaggcgccctgccgctcgggctgccaagacgaactcccgcggggggcgcctgtccaaatatgacgttcgtgttacaactcgcctgaacgctgcctttccatcgtggccgttggcgccgttgtccgggctccgcggcgcaacgcacgcggaacctggcgcgaggttggccattcgtcgtagtgccagggggggccacgccatgctgaaactgctcgacctgctctctgccgtcgccctgctggtgtggggcacgcatatcgtccgcaccggaatcctccgggtctacggcgccgacctgcggcgcatcctcagtcgcagcgtggaaaaacgcccgctggcgttcgccgccggcatcggcgtcaccgccctggtgcaaagcagcaacgccaccgccctgctggccacctccttcgtcgcccagggcctgatggcactggcgccggccctggcgatcatgctcggcgccgatgtcggcaccgcgctgatggcgcgggtgctgaccctcgacctgtcgtggctttcgccattgctgatcttcttcggcgtgattttcttcctcagccgcaaacagacccgcctcggccagctcggccgggtattcatcggcctcggcctgatcatcctggcgctccagctgatcgtcgccgccgccgagccgatgacccaagccaagggcgtcaaggtactgttctccagcctgaccggcgacatcatgctcgacgcgctgaccggcgcgttgttcgccatgatttcctattccagcctggccgccgtgctgcttaccgcgaccctcgccgcgtccaaggtgatctcgctgaaagtcgcgctgtgcctggtggtcggcgccaacctcggcagcggcatcctggccatgctcagcgccaccgcgcaaaacgccgccggtcgccgggtggccctcggcagcctgttgttcaaggtcgccggctgcctgctggtgctgcccctggtggggccgctggcggactggatggatcactggcagttcagcacagccgaactggtgatcgccttccacgtgctctacaacgccgcacgctgcctcgcctgcctgccgctgaccaacgccatggccagcttctgcacccgtgtgatgcccgaccgtgcccttcccgacgacgtcgcccggccgcgccatctcgaccccgccgccctcgacacgccgagcctggcgctggccaacgcggtgcgcgagaccctgcgcatgggcgacaccgtcgagcagatgctgaacaatctgatgcagatcatccgcggcggcgatccgctgctcggcaaggacatccgcaagctcgacgacgacgtcgacgccctctacaccgcgatcaagctgtatctggcaaggatgccgcgcgaggacctgtccgaacgcgacagccggcgctgggcggagatcatcgagctggcgatcaacctggagcaggccggcgacatcatcgagcacatgctcgccgccgtgcaggacaagaagacctcgcgcagccgctcgttctccgacaccggcctggaagagatcggcaccttgtaccagcagttggtctccaacctgcgcctgggtctctcggtgttcctcaacggcgacctcgacagcgccaagcgcctgcgccgggccaagcagcgcttccgtctgcaggaacggcgctacgcccatgcccatgtcgaccgcctgcaccagcaggtggtacagagcatcgagaccagctcgctgcacctggacctgatcagcgacatgaagcgtctcaactcgctgttctgcgccatcgcctacgccgtgctggacaatccagacgcgccgagcagcgcggccgacgagggcactcggcgggacgaggacgactgggccgacgaagtcgacgacatgacctcggcgccgctggccgagccagcgctcgccgaggagcgagcggaaacgcgccgttcgcgacattagccgttctgcgggtaggttcgtcatgaagcatccgctattctcggtattttcagttccaggctcggcccatgcgttcgttgtccaccctgctgctgttctgcctgctctgcccctggtcgtacgccgaccagcgcagcgaggtcgaagccttccagctggaaaacggcatgggcgtgctgctcaagcccaccgagcagcaccgacacgtctcgatccggctggtggtgggggtcggtttcgccgacttctcgtgccgtgaaaagcagctgccgcacctgctcgagcacctgttcttcagcggcctggacggcggcgacgaggccgacctggaagcccgcatgcaggccctcggcggacaatggaacgcctacaccagcgaaggcgacaccaccttcgtcatcgaggcacctgccgccacccagcggcaggtcctagacctgctgctggacaccatcacccgcaccgaactggacgagccgcgcatcgccgccgccaagcgagtgatcgagcgcgaaggcggcggccattactcgcacctgcagcgctggctcgaccgcgagaacctgggccgtggcgccatggaccaactggcggtggaactgggcctggcctgctcccagcgcgcgccgctggcgccgcttggcgcggagcagctggagcggctgcgcagcgactggtacgtaccgggcaacatgaccctgatcctggtcggtgacctcgatccgcgcctgccggcctatctgacccggaccttcggcaccctggaagaccacgagctccccgagcgccgcgagctgccggcggccaacgggcatgccgaggccaggcgcaccctgatcacccggccattcggcgagggtgcgatgctgcactggatctatccggagccggacgacgccgacccggacgccatggtcctgctccaggcctatatgaacgacgcgctgtacgccgacctgcgtgtgcgtcgcggactcacctacgggccatcgaccgatcgccaggtgttcgccaaccagggcttcttcagcctcgacgcggatgtcgagcgcagcgacctacccgccaccgaggccgccctgcgcgagttgctcggcggcatccgccagcatggcctggacccggggcgtttcaagcgggtgcaattcgccgagcgcgccaggctggcctggagcacccagggcaacgcggcgctggcggactattactggggctcgctggccgactacgaggacggccatttccccaatgaggagcgccgcctggcgaaggtcagcctgcaacaggcgaacgcgctggcgaagcggctgttcgacggcgaaggctacctgcgcatcgaaaagccgctattcgacgacgacatgctctacccattgctgctcgccgccggtctcctggccagcggcctgctctggttcggcctgcgccgccggcgcgcctgaccgggctacagggccaggcggtggatgacctgggtcgagtcgtccgggtcgcgctggccgacgaagcccagtgcgcaacaaaggtcgcgcatcgcccggttggccgccgagtccaccgaatacatctggcggaagccgttgcgccgcgccacgtcgatcagatggcgcatcagcacggcgtcgaggcccagaccctggtagtcgtcggcgatggttaccgcgcattcgcactgcccttcctcgcagcaggcggcgtagcggctgataccgacctcgcgcagctcaccgtcctcgtgcaccagggcaacgaaggccatgctctgctggtagtcgatgtccatcagttgatcgagcagcgccgggctggcttccttgatctcgccgaggaagcggaagtggcgggtcgccggggacagccggttgatgaactggcgttcgcgctcccggtcctcctcgcgcaggggacggatcagcacgtggcggccatcgtcgagggactcgacccaatggtcgccctctaccgccgcgaacgcggaagaccggctggcattttgtacattggacatgatgcgatctccaggaagggaaggaagtcggtacaaccacttccttcctgtctacgcggtttggcgcagctccggttgatcgacatcaacgccgccgccgcagccccggcgggagccgacgcacggcatgcggcgaaacgcctcaggcgttggccagctcggcctcggcgatctccttgccgcgccggcggaacagcaccagggtggcgagcagccccagcagcgccgcgccactgagccagatgcccggggccgcgcggttgtccagggtgtggatcagccaggtgcagaccgccggggtgaaaccaccgaaggtcgccgtagccaggctgtaggcgagggagaaaccggtagtgcgcacgtccgccggcatcacctcggtcaacgccaccaccatcgcgccgttgtagctgctgtagaggaacgacagccacaactcgacgccgagcaggccggcgaaactcggctcgcggaccagccaggacagcgccgggtaggcggtcagcagtgccagcgcggaggcacccagcaacaatggcttgcgcccgatgcggtcggagaacgcgcccatcaccggcagccagatgaagttggacaggccgatgcacatggtcaccagcaggctgtcgaggtccgacagttgcagttcgttcttgccgaaggtcggcgtgtaggcggtgatcaggtagaacgatacggtggtcatcaccaccatcgcggtaccggccagcactacgccgaagttctgcccgatggagcgcagcacctgcgacagcgacggtcggtgggtgcgcgcctcgaactccggcgtttcctccagcgagcgacggatgacgaacagcgccggaacgatcaggcagccgatgaagaacggcacgcgccagccccattcgcccatgtcctgcgggctcagccactggttgaggagcacgccgagcaggccggcgaagaccaccgcgacctgctggctggccgactgccaactgacgaagaagcctttgcgtcctggcgtggcgatctccgacaggtagaccgaaacccctcccagctcgacgccggcggaaaaaccctgcaggagccggccgaacagcaccagcaacggcgccgccacgcccagcgtggcatagccgggaacgaaggcgatcagcagggtccccatggccatcaggccgagggtgatgatcaggccctggcggcggccgtggcgatcgatgtaggcgcccaggaacaccgcacccagcggccgcatcaggaagccggcgccaaaggtggcgagggacagcatcagggaggcgaacgggttgtcgccggggaagaaggtcttggcgatggcggtggcgtagaagccatacaccatgaagtcgtacatctcgaggaagttgccactgaccacacggaaaatggcgacacctttggatttattagaggccatgggacacacactcaggcagacacggggaagcggtccatggcggcgtcgatggccacgcaggcgggtacgtcatccatcgaccgagttgtaaccatatgtgtaaaaactcctgtcgaacaatctaaaattgcccgaaaggtgcgaattgaaggggtttgaaaggctgtcgaaagcttcgcgaccatcggtcgggaaagcgacgcctttttccctggtcgacctccagaaaggagagcggagcctctgtcgggcgaaggaaacattcgccacgcggcagctgtccttcgttcatacccaggaaacccggccggggttatgctgcgcgccccggccggctggccgagcagctccgatcgagaacccgctggtccccatgcccaaccaacaacgccccgtcctcaaggcccgcctggagcaactgatcgccctggtcggcggcctgatggcccgctatccgcgcaccatcgccctgttcggcttctgttcgggcgtgttcagtttcatcatggtcgaccggcagaagggcttcgcccaggtgctggcgatcatcatgctggtcagttgggtctggttgatcctcgagaacctcctgcgggagaccttcgcccgccgcttcggctgggagatcccggcgccgctgctgcgctacgcgacccaactgatccaccaggaaagcctgttcttcgtcctcccgttctttctcatcaccaccacctggaacagcggccaggcgctgttcacagggacgctggccgccgcggcactgatctccatcaccgatccgctctactatcgctggctgtccaggcgtcgctgggtgttcctcgcctaccacaccctgaccctgttcgcggtgttgctgacctcgctgccgatcctgctgcacctgaccaccccggaaagctaccggttgtcgctgggcatcgccgtcgtgctgtccttccccagcctgctcgtgaccttcccgctacagcactggtggcgcggcttcctgcttctcggcctgaccctggcggtgggcctggccggatggttcggccgcacctgggtaccgccggccaccctgtggctgaccgaagtggcggtgagcagccagttcgacgaccagagccgcacgcccggcgacagcctggagcaggtcggcgccgcccagttgcgcagccagggcctgttcgcctataccgcgatcaacgcgccgcgcggcctcgacgagcgcatctatcacgtgtggatgttcaacgggaaggagttcgaccgcatcgccctggatatccacggcggccgcaaggagggctaccgggcctggacccacaagcagaacttccccggcgacccggtcggccactggcaggtgaaggtactcaccgaggccggacagatgatcggcaccctgcgcttcgacgtcacccagtgacgtcgaagcctggcgacctcaggcgaagaaccagtagcacacgccgatggaggcgatgaccccggccaggtccgcggtcagcgcgcagcccaccgcgtggcgcgcgcgctgcaggccgaccgagccgaaatagacggcgagcacgtagaaggtggtctcggtactgccctgcacggtggcggcgaccagcgccgggaaactgtcgacgccgtgggtctgcatggtctccagcagcatcgcccgcgccgcgctgccggagaacggcttgaccagcgcggtgggcagcgcctcgacgaagcggctgtcccaacccagcccctcgaccgcccagcgtatcccgccgagtaccacttccagcgccccggaagcgcgcaacacgccaaccgcgcaaagcattgcgaccaggtacggcaacaggttcctggcgacgtcgaaaccttccttcgccccctccacgaagctctcgtagaccggcaccttcttcagcgcgccgacgatcaggaacagcacgatcaggctgaacagcgtcaggttgcccagcagcgaggacagctgcgccagcgcggtggccgagagcgtgccgagcaccgccatgaagccggccagcagcaacgcgccggggatcaggtaggccagcaccaccgggtcccacaagcgcaggcgctgcatcagcgccaccgacagcaggccggccagggtcgaggcgctggtggccaggaggatcggcaggaataccagggtcggatcggccgcgccctgctgcgcgcggtacatgaagatagtcaccggcagcagggtcagggacgaggcgttgagcaccaggaagaggatctgcgcattgctcgcggtggtgctgctgggattgagctcctgcaacgccttcatcgccttcaggccgatcggcgtggcggcgttgtccagacccaggccattggcggcgaagttcagggtgatcaggccgatcgccggatgccccggcggcacttccggcatcagccggcggaacagcggaccgagcagcaccgccaggcgctccaccagcccggccttctcggcgatgcgcaggaaaccgagccagagcgtcagggtgccgaacagcaggaccatcacctcgaccgccagcttggccatggcgaacaggctctccaccatcgccgcgaacaccgtcgcatcgccgccgatcaaccagcgcgccagcgcactcgccgccgccaccaggaaaaaacccaaccacaagccgttcagcattcagaatcccccgcgttgcgcggatgatagcggcgcaggcggtgccggcgccagaaacgccgaggccccggacgatgccggggcctcctgggcgggaagccgccttattcgagggtggcctgcttgcccttggcttcgccgaccgcctgccgcaggtgcggcagcgaatcccagtagcgctggcccttggccgcgtcgtacatgccttcccacttggagatgaccagcaccgcgagggcattgccgatcacgttgagggcggtgcgcgccatgtccatgatgcggtccacgccggcgatgaaggccaggccctcgagcgggatgccgacgctgcccagggtggcgagcagcaccacgaaggatacgcccggcacgccggcgatacccttggaggtcaccatcagggtcagcaccagcatgatctgttggccgatggacaggtcgatgccgtaaagctgcgcgatgaagatcgccgcgatgctctggtacagggtcgagccatcgaggttgaaggagtagccggtgggcaccacgaagctgctgatcgccttcggcgcgccgtaggcttccattttctcgatgatgcgcggcagcacggtttccgagctggcggtggaataggcgaggaccaggtcgtccttgaagatgcggatcaggcgcatgatcgagaagccgaacatccgcgcgatcaggcccagcaccaccagggcgaagaagacgatggccacgtagaccaggatcaccagcttggccagcggcagcagcgaggcgaagccgaagttggcgacggtcaccgcgatcagggcgaagacaccgataggggcgtacttcatgatcatgtgggtgaccttgaacatggtctcggaaacgccctggaacaccttcaccagcggctcgcgcaggtcgttgggcaggctcgacaggccgaggccgaacatcaccgagaagaagatgatcggcagcatctcgccacgggcgatggcggcgaagacgttggagggaatcaggttgaggatggtcgcgatgaacgcatggtcatgctgcacttcctgggtggtcttctggtactgggaaatgtccacggtacccagggtgctcatgtcgatgccggtgccgggctggaacaggttggccagcagcaggccgacgacgatggcgacggtggtgacgatctcgaagtagatgatggtcttcaggccgatgcggccaagcttcttcgcgtcgccgacgccggcgatgccgaccaccagcgaggaaatcacgatcggcaccacgatcatcttgatcagacggatgaagatgtcgccggccggttgcagcacgttggcgatccaccaggccttttcggcgctgaaatggttgagcactgcgccgacggcgataccgagtgccagaccgatcacgatctgccaggcgaggcttagcttggctttacccatgtttcgtcacccttaattcttgtggaagtcgggagtcgctccaacgggagagtcgctcccgacaggcgaaagggcgcaatgattcatgcgctcccctaccccgtctaatgccgtaagtgactgccccatgccgaatcggcatgagaaatcactaatgaaacgtccgtcccacaggaaattgcccttgattttcgtacaagaacagggagcggaaggcactccgtgcaaggcccgggagccacgtgcccatcctgggaagttgaaagtcgctcatcatcgctgcgatggatggtcgcaggacacgcaacgccgtccggcacgccatcgccggctgtggataagcggcattctgtggataaccgcgcggtaaagcccttctgggagggcgcctcggaacgcgcgggcggtcgattgtaaaacgactccgccatccacaggcattgatcgatatcagggaagttcgcggagtatcgctgcggaagccgacgctccgccggacggcggagcgtcgtaccccttctatatatagaagcgcgccggaaggcagcgagacaacggtggctcccctccggcgcgttttcgcctggcccgaccccgaaggaggtactccctgtacccctggaacccgccggatcgacctcacccagcgcatcccggtcccctggccatgccccgctgcgggcggggcggtgtcacgcaagcccgttccgcctcagtaccagttcggatcggccttgagttgttcgtcgaggatcttctgtaccgccggttccggcttgcccagccagcggaagctggcgtgcttgctcggcgacttgtcctgcggcagcccttcgggcacctgcacgtagagcccgtaggcatgactcttgtcccaatcgaaggcgaccagcaggcgatggcccttgcaatcggacttctcgcagagaccgccaaccagatacttgtcgccctggtcgtcgacggcatgcatcggcgtagcggttcccgagagattcatcacccagtcgggcaagcggctctcgtcttccaccaggttctgccaggccttgcggtatccggcatcggtgctctgcagttcgttcaagcggtattcgccgtccctgtcggccgccaccgccagcgaactggcggcggcaccgagcagcagtgcgttcatcaggttacgcatgagtcgcatcgctttctccttggcatccggttagccgcgacggcgtccgaagaagaacgagaccacgaagagcaccaggaacagcacgaagaggatcttcgcgattccggtggcggcacctgcgatgccaccaaacccgaggacggcagcgatgatggcgatgatcagaaaggtaatagcccaactaagcatgatgttttctcctgtgtgccttcggaactgtcggtaccgcctcggggccaggcccatcggggtagcgaaccggcctgtgtccattttttcttcagggagaccgtgactacctcattgcacgccgcatgccagcctttctgacaaataaaaacacttttaattcaataagttataaaacaacccaggtagtctgcgcagttcatcctgcacgacgcgacaaattattccgggcgttttgcacgatcggcgcggtacgctgtcacatgcaacagggaagcgacccggcacctgctacccggagccatccgtggagccgccacggcttcccgaaaacccaagaacagacatcggcaggttgcacgccgccctggccgcccggatgggcggcggggcgctctgcaacttgcatgggctttccggggactaacccagaagccgaatggcagtgaattccctagaggataaaaagcaacgatggaaaccacttccgaaaaacaggggcgcatcctgctggtcgatgacgagtcggcgatcctgcgcactttccgttattgcctcgaagacgaaggctacagcgtggccaccgccagcagcgcgccgcaggcggaggccctgttgcagcgccaggtattcgacctgtgcttcctcgacctgcgcctgggcgaagacaacgggctcgacgttctcgcccagatgcgcgtccaggcgccatggatgcgcgtggtgatcgtcaccgcgcattcggcggtggataccgcggtcgacgccatgcaggccggcgcggtggattacctggtcaagccctgcagcccggaccaactgcgcctggccgccgccaagcaactggaggtgcgccaactgaccgcgcgcctggaggccctggaggacgaagtgcgccgccagggcgacggcctggaatcgcacagcccggccatggccgcggtactggagaccgcgcgccaggtagcggcgaccgacgccaacatcctcatcctcggcgaatccggctccggcaagggcgaactggcacgcgccatccacacctggagcaaacgcgcgaagaagccccaggtcaccatcaactgcccgtcgctgaccgccgaactgatggaaagcgaactgttcgggcacagtcgcggcgccttcaccggtgccaccgaaagcaccctgggcagggtcagccaggctgacggcggcaccctgttcctcgacgagatcggcgacttcccgctgaccttgcaacccaagctgctgcgcttcatccaggacaaggaatacgaacgcgtcggcgatccggtgacccgccgcgccgacgtacgcatccttgccgcgaccaaccgcgacctgggcgcgatggtcgcccagggccagttccgcgaggacctgctctaccgcctcaacgtgatcgtgctcaacctgcctcccctgcgcgaacgcgccgaggatatcctcggcctggccgaacgtttcctcgcccgcttcgtcaaggactacggccgccccgcccgcggcttcagcgaagccgcccgcgaggccatgcggcaatacccctggccgggcaacgtacgcgagctacgcaacgtgatcgaacgcgccagcatcatctgcaaccaggaactggtggatgtcgaccacctcggtttcagcgctgcgcaatctgccagcagcgcgccgcggatcggcgaatcgctgagcctggaagacctggagaaagcccatatcacggcggtgatggcctccagcgcgaccctcgaccaggccgccaagaccctcggtatcgatgcctcgaccctgtaccggaagcgcaagcagtacggcctatgagcatgccgctgccgatgaagctccggacccggttgttcctcagcatttccgcgctgatcaccgtctcgctgttcggcctgctgctcgggctgttcagcgtgatgcagctcggccgcgcccaggaacaacggatgtcgcaccactacgcgaccatcgaggtgagccagcaactgcgccagttgctcggcgaccagttggtcatactgctccgcgaaacccccgacgggcaggccctggagcgctcgcaaaacgacttccgacgagtcctggaacagggccgggcgaataccgtcgacagcgccgagcaggccgccctggatggcgtccgcaacgcctacctgcaactgcaggcgcacaccccggccctgctcgaggcgcccatggccgacaacgacggcttcagcgaagccttcaatggcctgcgcctgcgtttgcaggacctgcagcaactggcgctggccggcatcagcgaagccgagaccagcgcccgccatcgtgcctacctggtcgccggcctgcttggcctggtgggcgtcgccatcctgctgatcggtttcgtcaccgcccacagcatcgcccggcgcttcggcgcgccgatcgaaaccctggcgcgggcggcggacaggatcggcgaaggcgatttcgacgtgaccctgccgatgaccaacgtcgccgaggtcggccagttgacccggcgtttcggcctgatggccgaggccctgcggcagtatcgcaagaccagcgtcgaagaggtgctttccggcgagcggcgcctgcaggcggtactcgacagcatcgacgacggcctggtgatcttcgacaaccagggacgcatcgaacacgccaacccggtcgcgatccgccagttgttcgtctccaacgacccccatggcaagcggatcgacgaaatactcagcgatgtcgatgtccaggaggcggtggaaaaggccctgctcggcgaagtccaggacgaggcgatgcccgacctggtggtggacgtcgccggcgagtcgcgcctgctggcctggtcgctgtatccggtcacccatcccggcgggcatagcgtcggcgcggtgctggtggtccgcgacgtgaccgagcagcgcgccttcgaacgggtccgcagcgaattcgtcctgcgcgcctcccacgaactgcgtacgccggtgaccggcatgcagatggccttcagcctgctccgcgaacgcctggacttccccgcggagtcacgggaagcggacctgatccagacggtggacgaagagatgtcgcggctggtcctgctgatcaacgacctgttgaacttctcgcgctaccagaccggcatgcagaagctcgaactggcttcctgcgacctcgtcgacctgctcacccaggcgcagcagcgtttcattcccaagggcgaggcccgccgggtctcgctgcaactggagctgggcgatgagctgccgcgcctgcagctcgatcgcctgcagatcgagcgggtgatcgacaacctgctggaaaacgccctgcgccatagcagcgaaggcgggcagatccacctgcaggcccggcgccagggcgaccgggtgctgatcgcggtggaagacaatggcgaaggcattcccttcagccagcaaggacggatcttcgagcctttcgtccaggtcggacgcaagaagggcggcgccggcctcggcctggcgctgtgcaaggaaatcatccagctgcatggcgggcgcatcgcggtgcgctcgcaaccgggccagggcgcgcgcttctacatgctgctgccggtgtgaccggggccgctcccggcaggcttttccacaggcctcaggaagtcggcaccgccagcagcagggcggcggtttccaggtccggctcgccatcgaagcgagccggacggtatttcatctggaaagcgccgatgacgtcgcgggtgtccttctccagctcgccggtctgcggcaccaggtaaccgtgccgcgccaactgctgctggaaccagcgcacatccggcagctggccgttcagttcggcgagccggcgcgccaattcgccgggcttcggccagggcaccaggccggcgtcggcgaggcgcttccaggggaacagcggacccggatcgaccttgcggcccggcgcgatatcgctgtgtccgatgatccggtccggggtgatgccgtggcgcttggcgatgtccttcagcagggggatcagcgcctggatctgcgcttcgctgaacggataccagacccgcccctggggtgtatcgcgatagccctggttgacgatctcgatgccgatcgaggtggcgttcagccaggtccggccctgccattcactgaccccggcgtgccaggcgcggcggttctcatccaccaggcggtagacggtggccggctcgtcgtcgccgatcaggtagtgcgcgctgacgccgccgtgggtgaggatgcccagcgaatgcggcagatcggtggaggtgtagtggaggacgatgaactggacgcggctgtcctggttcgccgaggtgtagtcggtgttcaggcgcgggccgctggagcagccggccagcagcgacagggtgaaagccagtagaacgaacgaacgcatgatgactccgaaagataggcagcgtggtcaggcggcgatgtgcaacacgctgcgcaggttgtccaacagcatatcgacgctgagcatgatcagcagcatgccggccaggcgctcgatggcggtcagcccgcgcgggccgaggaaacgctggaggaacgccgcctgcagcaggatcagcgcagtagcggcccaggccagcaccaccgccaggtaaagctcccacagcggaccgtcgaaggtggtgcgcagggtgatcagcatcgccagcgccgagggcccggccaccgccggggtggccaggggtaccagcagcggctcgccgtcgggcacttcgccgagcagcccttgtggcgacgggaagatcaggcgcatggcgatcacgaacaggatgatgccacccgcgatcccggtcgcctcgcgggacaggccgaggccgctgaggatgtgctcgccgagggtgaggaagagcagcagcaggcccagggcgaaagccagctcgcgaaacgccacgcgcaggcggcgcccaggtgcgacgcctttcagcgcggcgaggaacacggcgatgttgccgaaggggtcggtgaccagaaagatcaggacggcgacgccgaacatatccatgggagtttccagagcgggacagccggtcattctaccgggcgggaccattctagcgagccgcggcaacacctgcaggcgagcccgtcccgagtcgtcgaaatgtgcgctggtcgcccttcaggccacttccaggcggtcccggccggcgcgcttggctcgatacagcgcctggtcggcacgctcgaaaaccgcttcgccggcctcgttgccttcgaacgcggtgatgccggcggaacaggtgatgctcaggggctcgcccttgaaatggaacggacaggcggcgatcgccgcgcgcagccgttcgagcagttgccggccggcttccagggacgtggccgggagcaggacgacgaactcctcgccgccgaaacgggcgatgaaatcggcctggcgcaaccgtttgcgcaattcgccggcaatgatcttcagcaccttgtccccggccaggtggccgaagtcgtcgttgatccgcttgaagtggtcgatgtccagcaccgccagcagcagatcgccgccgtcccggtgccggcgcgccacttcctgttccaggcgctcgctgagcgccgcgcggttgggcaggccggtcagcggatcggtcagggctttctgtcgctggtcctccaggtggctgtggaacgccttggcatcctgctccatgctgttgacccgctccatcagcgcctgcaggcggccggacacctcctgttcgtgctcggcctgttcgcgctggtgttcgtccatggaggcaagcaggccgttcagccggctgtccaccgccagcttgaggctgttcaggtcggtcgcctgctgcacgctggcctgcaggccactgacctgctcacgcagcgattggtcgaagccgcgcgcgttgtccagcacgtcggtatagccggcgtgggcgtcgcctaggtggccgaggaagctttccaggcgctcgttgagttgccgcaggtattcctcgaagtcgcgctggccactgtccgccagggacagcaccagcaccgccaggtcgtcgagtaccggcaccagctcataccagttcaggctgccatcgatccgctcccgcagcgcctcggcctggggctggtggctgctcggcagggacaggccgtcgagcagccgcagcaggctggcctcgatgtgcggcgccaccgcgctgtagccgggctccggtatcggcggcggcagttcgtaggcctcgtctaccgcctgcccgtcgaggttatccacaggagtggccggagcttcgggcgcgctttcaacgtccgccggcattgcgggcgacggctccgcacccgcttcttccagcgtctcgctaaagctcaggccggccggtagcggcaggctgtcgagccagatttcccggggctcatccagcaggatctggttcggctcgccacgctcggcgaccccgacccaacccgctggcgcgctttcgatggcggcgaccgtgcgggcgggcaacggctgcggcggaccgcctggcgcctcgtcgtgctcggcgaccggcagggacggcgcggccgccgccggttggatcggtgtattgcttgccgccacaacggacggcaccgatgcgctcggctccgcggtggtttccgactccttgccgccgaacaggcgttgcaacaggctcgggcgaccgtcttcggcatcgccgcccttgcgctcggccagcgcctggcgttgcagcctgctcagctcgctgagcaggatcggaatctcgcgcgactgccgggcgcgctcctcgatatcgcgggcgaactgcttcagcggcttgcgcagttcccgcggcaggtccagggccagcaactgctgggccagttcgccgagagcatcgatgttctgctgggtgcgttgctggcggcgctgttcggagtcgagcacggccttttccaggcgcggaatcaggcccgacaggccggcgtccatgtcgtcgcgacggaggatctcgcgcagctccttcatgcactggtcgaccgccttgtcgctgccttcggccgccagactgctacgcaccaggccgcgacgcagcaggtcgatgcgggcatcccagcgccgttgcaggcgctcctgctgctcgatgttctccaggtacttgtctttccagcgctggacgtcgtcgcgactcatggcggactcccggcatccccgcgcacgaccaaggccttgtcgcgcaggttgtccggcaggcgaatctccaccgataccggcagatggtcggagatcggctggtcgagcacgtcgacccgctcgagagcgagatcggaactgagcaggatgtgatcgagattgcgctgcggccgccagctgggaaacgtcgcctcgacctgcggcgccatcaggccgaggtcgcgcaggggcgagttttccagaagatcgacggcgtgggtgttcatgtcgcccatcagcacctggtggcggtagtcgccgatcagctcgcggatataggcgagctggcgggtgcgggtgcgagcgccgagagcgagatgcatcatcactaccaccagcgcgtcggcgccttcgccaaagcgcacgaagatcgcgccgcgtcccggcggaccgggcaacggatgatcttccagcagggtcggccgccagcggctgagcaggccgttgctgtgctgggcgatacgcccgaggttgcggttgagctgctggtaccagtaggggaacgcccccaactgggccaagtgctcgacctgattgacgtagccggaacgcaggctgccgccgtcggcttcctggagggcgacgaggtcgtagtcggcgagcagttcgccgatccgcttcaggttggtcgcccgccccgcgtggggcagcaggtgctgccaaccgcgggtcaggtagtggcggtagcgctcggtgctgataccgacctggatgttgaagctgagaaggcgcaggcggccgtcgtcgggcagctcccgcgaatcgtcacaggaggggttcactcgcgggtcgcagctacctgcgacccgaggttcacgctgccagcggcgcaacatgccgaatcaccttgcctacttcttggccgctgcgcgctctttctcgatcaggtagtcggccagcttgagggtttcctccggaccaccggcggagccgatgtcgaagcggtatttgccattgaccaccatggtcggtacgccggtgacctggtaggccatcgccagcttcttggccttttccatctggcccttgatggcaaaggaattataggtgctcaggaatttttccttgtccacgcccttgccggcgaggaaatcggccatttcttccggagtggcgagcttcttgtgctccttgtggatcgcctcgaacacggcgttgtgtacgtcatgctcgacacccatgctttccagggtcaggaacatctgcccatggacgttccagataccgccgaacagggcaggcaggcgcacgaaatggacatctgccggcagcttctcgctccacggcacgatggtcggctcgaacgcgtagcaatgcgggcagccataccagaacagttccaccacttcgatcttgcccggctgggacaccggcaccgggctgctcagctcgacgtattccttgccggcggtatagtcgtcggcctgagcggccatgccgaacaggctggccatggccagcatggcggtgagaatcaggttacgcatcgttcactcctaggcgaggtcagtgccgctctccggccgggttcggcccggtcagttcgaccggggggagcggtcacgggttccagcattgtagcgatggcggacgcaaaaaagggcagccgaggccaccctttttcatacatcttttttgccgtgctacgcagcgatcagtgcagaccctggatgtagctggaaatcgcggcgatgtccttgttcgacagcttggcggcgatggactgcatgatcttggtgtcgccgtcgttggtgcgggtgccttcgcggaagtcggtcagctgcttggccacgtaggtcgcgtgctggccgcccaggtgcgggaaaccggcggttgcgatgccgacgccgctcggggaatggcaaccggtgcaggccggcatgccttcggcgatcttgccgccgcggaacagcgcttcgccctgggccaccaggttcggatcggccatgccgacgctcatcttctggctggcgaagtaggcggcgatgtcggccaggtcctggtcgctgaggttggtcagcagcccggtcatttccagcacggtacgcttgccgtccttgatgtcatgcatctgcttgagcaggtaacgctcgccctggccggccagtttcgggaagttcggcgccgggctgttgccatccgcaccgtgacaggcgccgcacaccgcggctttcgcctggcccgcggcggcatcgccagcggcatgggcaaggccggtcagacccagggtcaacagcagactcacgagaagtttgttcatcagctaatccaattacggctaagggtgaaagatagtgggcttcggctacttcttcaccatccactggatggttgcctggtagtcttcggcactgcagtcggtgcacaggccgcggggcggcatggcgttgaatccgttggtcacatgctggaccagggtcggcatgcccttggccagccgcggctcccaggcggcatggtcgccctttttcggcgccatcggcagctggccgtcgtgacacgcgccacaggtccggttgaacactgcttccgggtcctgcgccgcctgcgccgtaacggccaccgcaacgactgtcgctgcgagcagcagtttcttcatgatcgtcctcatcagggggaacgcccgcgttctaccgcgcggaaaatgctctgtccgttcccgcgcgcgctcgaccctgggggataaagcgcacacaaaatccgcggcattatatacttccgataccgaaacggaaacgaaacagccccccgcgacaccgagtcgcacccctgtggataacccatgtcagagaagaaccccatcgtcggcctgtgccagaaggccagctttctcatcagtgccgcccaggtcgaccagtgcccccccgacgaaggcctggaagtcgctttcgccgggcgctccaatgccggcaagtcgagcgcgctgaacaccctcactcacgccaacctggcgcgcacctcgaaaaccccgggacgtacccaactgctcaatttcttcgccctggacgactcgcggcgcctggtggacctgcccggctacggctacgcgaaggtgccgatccccctgaagcagcactggcagcgccacctggaagcctacctgagcagccgcgcaagcctggccggggtgttcctgatgatggacatccgccacccgctcaccgacttcgaccgactgatgctggattgggcccaggccagccagctaccgatccatgtactgatgaccaaggccgacaagctggccttcggcgcggccaagaacgccctgctcaaggtacgccgggaagtccagcaaggctggggcgacgtcgccaccctgcaactgttctccgcgcccaagcgccagggcgtcgacgaggcgcaaatggtcctggcgcaatggctgggcctgctggacgaggaacaagaggcgttcgaggaagcctgaattccaggcaaaaaaaaccccgagcttcgtatggggagggggaagttcggggttcaagtccggaccgctagggcggggtccaggaatctgccaacactaaacactgcaaaggagcatcgaagggctcaagaagccattcgtgtgttctgactgtcggcaaaacgggaaagttcagcgcaccgcgaaaaacttttccacggcaccctcaccgggcactccggacctgctcgcaaggcccgccacacaggcctcgcaaccgttcatcagtgggcttcgtcccagttcgaaccgacacccgcctcgaccaccagcggtacgtccagggtcgccgctccgctcatcagcgggcggattccctcgcacacctgctcgaccagctcctcgcgcacttccagcaccagttcgtcgtgcacctggaggatcacccgggcatcgaggccgctttcctgcagccagttatccacagcgaccatggcgcgcttcatgatgtccgccgccgtgccctgcatcggcgcgttgatcgcggtgcgctcggcggccttgcgcatggcgccgttcttcgaatggatctccggcaggtacaggcgacggccgaacagggtttcgacgaagccctgctccgcggcctgggcgcgggtccgttccatgtacgccaggacgccggggtagcgggcgaagtaacggtcgatgtaggcctgggcctccttgcgctcgacgccgatctgcttggccaggccgaaggcgctcatgccgtagatcaatccgaagttgatcgccttggcgctgcgtcgctggtcgccgctgacgtcttccagcggcacgccgaagacttccgccgcggtggcgcggtgtacgtccaggtcgtggcggaaggcatccagcaggccatcgtccttggccaggtgggccatgatccgcagctcgatctgcgagtagtccgcggccaatagcttgtagccctgcggcgcgacgaacgcctggcggatgcgccggccctccgcggtacggatcgggatgttctgcaggttcgggtcgctcgacgacagccgcccggtagccgccaccgcctggtggtatgaggtatggatgcgtccggtacgcgggttgatctgctcgggcaggcggtcggtgtaggtgctcttgagcttgctcatggagcggtactgcatgatcaccttgggcagctcgaagtcctgctcggccagttcggcgagcactgcctcggcggtggacggctggccggtcgcggtcttgctcagaaccggcaggccgagcttgtcgtagaggatcgcgccgagctgcttgggcgagccgaggttgaattcctgccctgccaggtcgtatgcctggcgctccagggcgaccatcttctcgcccagttcgcggctctggatgcccagcaggttggcgtcgaccagcgcgccgttgcgctcgatccgcgccagcaccggtaccagcggcatctcgatgtcggtcaggaccctggccagggacgggatcgcctccagcttctgccacagggcctggtgcaggcgcagggtcacgtcggcgtcctccgccgcatagggcccggcctgttcgatggcgatctggtcgaaggtcagttgcttggcgcccttgccggcgatgtcctcgaaacggatggtgctgtggccgaggtacttcagggccaggctgtccatgtcgtggcgagtggcggtggagtccagcacataggactcgagcatggtgtcgtaggctacgccccgcagcgcgatgggggtgctggcattggccaggacattgatgtcgtacttggcatgctggccgaccttgagcttcttcggatcctccagcagcggtttcaacgcacgcagcaccgcgtcacggtccagttgctccggaacgcccatgtagctgtgggccagcggcacgtaggcggcctcgccctccttcacggcgaaggacacccccaccacctgcgcctgctgggcgtcgatgctggtggtctcggtatcgaaggcgatcagctcggcctcctccagcttcttcagccaggcgtcgaatccggcctggtcgagcaccacgtcgtagtcgacctcggcctggataggcgtttccgcctcgccgttctcgccggcctccttggcctcgcgcaggaggtcgtccagccagttcttgaactccagctcgcggtacagggcgatcagcgcttcgcgctgcggctcgccgggatacagcttgtcgatctccacgtccagttcgacgtcggtcttgatggtcgccagttgataggacaggaacgcctgctcgcgattttcctcgagcttcgccggcaagcccttggcgccgcggatcggtagctcgggcaccttgtccaggctggcgtagagcacctccaggccgccaccgacaccggtcagcaggcccagcgcggttttctcgccgacacccggaacgccggggatgttgtcgaccttgtcgcccatcagggcgaggaaatcgatgatcagctcaggaccgacgccgaatttctctttcacgccatccacgtcgaggcggctaccggtcatggtgttgaccagcgtaatgtgcccgtcgaccagttgcgccatgtccttgtcgccggtggaaatcaccaccgggcggtcagccgcggcgctgctgcgcgccagggtgccgatcacgtcgtcggcctcgaccccctccacgcacagcagcggcaggccaagggcgcggacgctggcatgcagcggctcgacctggacccgcaggtcgtcgggcatcgacggccggttggccttgtactcggcgaacagctcgtcgcggaaggtcgggcccttggcgtcgaagaccaccgcgaacgggctgtccgggtactgcttgcgcaggctcaggagcatgttcagcacgcccttcaccgcaccggtgggcttgccggtcgaggtggtcagcggcggcagggcatggaaggcgcggtacaggtacgaggaaccgtccaccaggacgaggggcgcttggctcatgaggggaatcaaccttttccggagaccagggcgtgtagaatgaaccctggacgattcgataaaggagcaaggttaccatgcgtacgctgaaccgcttgatgctcgccggactgctggcgttcgccccgctcgtcgcgatggcggcggacgacgacgcgccctccggcgagcccgacgtaaccatccgccaggagggcgacaagaccatccaggaataccgcgtgaatggcttcctctacgccatcaaggtggttcccaagcatggcaaaccctatttcctggtccgcgccgacggcagcgatggcaacttcattcgctccgaccagccggacaagctgattccacaatgggagatcttcagctggtgatgtgcatttccaacctggcgaggccgcgctgacatgtcggtgttcaccccactcgaacgctcgaccctggaagccttcctcgccccctacgacctgggccgcctgcgggatttccgtggcatcgccgaaggctccgagaacagcaacttcttcgtcagcctggaacacggcgagttcgtcctgaccctggtcgagcgcggcccggtgcaggacctgccgttcttcatcgaactgctcgacgtgctccacgaggacggcctgccggtgccctacgccctgcgcacccgcgacggcgaggccctgcgccgtctcgaaggcaagccggcgctgctgcaaccgcgcctggccggccgccacgagcggcagccgaacgcccaccactgccaggaagtgggcgatctgctcggccaccttcacgccgccacccgcgggcgcatcctcgaacgcccgagcgaccgtggcctgccctggatgctggaacaaggtgccaacctcgccccgcgactaccggaacaggcccgcgccctgctcgccccggccctggcggagatcgccgcgctggatgccgagcgtccagcgctgccgcgcgccaacctgcatgccgacctgttccgcgacaacgtgctgttcgacggcccgcacctggccggcctgatcgacttctacaacgcctgctccggctggatgctctacgacctggcgatcaccctgaacgactggtgctccaataccgacggcagcctggacccggcccgcgcccgcgccctgctcgccgcctacgccaaccgccggccgttcaccgcgctggaagccgagcactggccgagcatgctgcgggtcgcctgcgtgcgcttctggctgtcgcgactgatcgccgccgaggcgttcgccggacaggacgtgctgatccatgatccggcggagttcgagatgcgcctggcgcaacggcagaacgtggagattcatttgccgtttgcgttgtaggcaggaaccacaggagcacggccgtcctgcggccgttcgcccttcaaaaaccatgcggttcggcgtcttggagtgaggccgagccgacatcctgtcgaggcttcgtcgttcagcccacccccggcccggccatcctggccggtcgttcgcccttcaaaacgcatgcggtttggcgtctggggtgaagccgagccgacatcctgtcgaggcttcgtcgttcagcccaccccggcccggccatcctggccggtcgttcgcccttcaaaacgcatgcggttcggcgtcttgggtgaggccgagccgacatcctgtcgaggcctcgtcgttcagcccacccccggcccggccatcctggccggtcgttcgcccttcaaaacgcatgcggttcggcgtcttgggtaaggccgagctgacatcctgtcgaggcttcgtcgttcagcccacccccagcccggccatcctggccggtcgttcgcattgaaaaacgcatgcgtttttcaagtgctcacccacatttcgagtgtccgcagttgaggcaggtggcgcagccgtccatctgtaccaccgccatgctgttgcacttgccgcacagttgcgcgccggcggggaagccttcgcccggctcgaccttgctggtgccctgggcggcctcgtaggcggcgcgtttttccgcgaggaaaagacgctgttcctcgtccagttcagggccacgcaacaagccgatggccgtcaggtggcgctccagcacgccgccgatctcggcgacgatggaaggcatgtagatgccgcctttcttcaggtagcccccgcgcgggtcgaataccgccttgagttcctcgacaaggaaggtacagtcgccgcccttgcggaaaaccgcggacatgatgcgggtaagtgcgacgatccactggaaatgatccatgttcttcgagttgatgaagatctcgaagggacgccgctgctcgtgcgccgtgcccgcattgaggaccatgtcgttgatggtcacgtagagcgcgtgctcgaacagcggcgacttgatcttgtaggtggcgccgatcagggtatccgggcgctccagggtctcgtccatctgcaccaccgacgcggcttccgcggcggcggcaagggcctgctcctcggcttcgttgacgaccttgaagcccttgatcttctgcgtgatcttgactgctgacatatcgattcccccggcctcagtacttgccgtaatagccttctttcaaggcgtcgaagaggttggcggcggtatggatctcaccgtcgtactcgacctgctcgttgcccttgaactccaccacgctgccgtcctccagttcgaagcggtagcgggtcttctccaggtcggactccttgaccagcacgccctggaacgcctcgggattgaagcggaaggtggtgcagcccttgagtccctggtgccaggcgtagcggtagatgtccttgaagtcctcgaacgggtagtcggtgggcacgttggcggtcttggagatcgacgaatcgacccacttctgcgccgccgcctggatgtccacgtgctgcgccggggtgacgctgtcggcggtgatgaagtagtccggcaggcgtcgcgccgggtcgtcgctgtccggcagggcctgggcgttgaccagggtccggtaggccagcagctcgtagctgtagacctcgaccttttccttggtcttgcggccttcgcggatcaggttgcgcgaataatggtgggcgaagctcggctcgatgccgttggaggcattgttggccaggctcaggctgatggtcccggtcggcgcgatggagctgtggtgggtgaagcgcgcgccggtttcagccaacgcctcgatcagttccggagcatgttcggcgacccgttgcatgtagcgggaatacttggcgtgaagcacgctgccgcggatgcggtcgccggccttatagccatcggcggccatttccggacgcttgcgaagcatttccgcagtgacttcgtagtcctgcgccaggatcggcgccgggcccttctccctggccagctccagggccacttcccagcccaccagggccatttcccgcgccacttcctcggtgaatacgcaggcctcgggactgccgtagcgcagcttgagcagggtcagggtcgagcccaggccgaggaagcccatgccatgccggcgcttgccaaggatttcctggcgttgctgttccagcggcaggccgttgatttccaccacgttgtcgagcatccgggtaaacacccgcaccacttcgcggaaacggtcccagtcgaagcgcgcctcgtcgccaaatggctgctcgacgaagcaggtgaggttgaccgagccgagcagacacgagccgtacggcggcagaggctgctcgccgcaggggttggtggcgcggatcgcctcgcaccaccagttgttgttcagttcgttgacccggtcgatgaggatgaagcccggctccgcatagtcgtaggtggagaccatgatcatgtcccacaggtggcgggcgcggacctggccgtagaccttgcaggcgaccagcccgtcggcgcgctgaacgtagtcgtcctggatcggccattcgcgccagaccaccgcgttggggtcttcgaggtcgatctcgtcgcgctccttcacgtgcaccgggaataccagcggccagtcggcgtcctgttccaccgcctgcatgaactggtcggtgatcagcaggctcaggttgaactggcgcaagcgcccgtcctcgcgcttggcgcggatgaattcgcggacgtccgggtggctgacatcgaaggtgcccatctgcgcgccgcggcggccgcctgcggagctgacggtgaagcacatcttgtcgtagatgtccatgaacgacagcggcccgctggtgtaggcaccggcaccggaaacgtaggcgccgcgcgggcgcagggtgctgaactcatagccgatgccgcagccggccttgagcgtcagcccggcctcgtggactttctcgaggatgttgtccatggagtcctggatggtcccggacaccgtgcagttgatggtcgaggtggccggcttgtgccccagggcgccggcgttggagatgatccggccggccgggatggcaccgttgcgcagggcccagaggaagcgcccgtaccagtgttcgcgggaggccttttcctcgacatcggcaagggcgcgggcgacgcgttgccaggtaccgtcgacgctggcatccaccggcgtaccgtccttgctcttgagccggtacttcttgtcccagatatcctgcgacgcgtcctgcagggcgatggtcccgcgttcggtgcggggactgcgtgcgtctgtcttggccatccgctgattaacctcccgatggttgttggggcgtccgaagccggccaccgtacgcaacatctagttatccgtacctgacgggaatcaatatcttgtgtcaggcagcaacagacaaccttagtcatcgggacgccgcgcgcaagagggcgcggccatcagtcacgggttttcagagcttttccagacagccggcaaattcgcctgccaggttgttcagaagattctcatagccgttggcgtccacgctcacgttcacgcccaggtcgtccagttcggccaggcgcaccggcaggccttcgctgagggtgtcggccagccgcggtcgaagcggcggctcgctgaagatgcaggccggaccggcggccttcagctgggcgcgcatggcggcgacatggcgtgctcccggctggacctccgcagataccgcgaacacgccggtatggcgcaatccgtaggcttcctcgaaatagtcgaaggcttcatggaagacgaagaaaggcttgccggcaagcttgcccaggcgttcgcggagtttgccgtcgagcccgccgaggcgctcctcgaaggccttcaggttggcccggtagcgcccggcgttggccgggtcgacctgggccaggtcctcggccatccgcgcggcgatggtgcgggcgttggccggcaacagccagaggtgggcgtcgagcatgccgggacgatggtcatggtcgtgctcgtcgtgcccggcatgctcctcttcctcgaaattgacgaacttgcgcaggtgcatgcccggcaggtcctgcaccgcgacgctggcgccctggcggccggcgagcaccttgggcaggaagttctccaggtccgggccgatccagtagaacaattgcacctcgcgcagccgccgtacgtcggaaggacgcagggcgtactggtgcggcgaggcgcccggcggcagcagtacgtccggctggccgacgccgtcctggatggccgcggcgaccagttgcagcggtttgatgctggtcagcacgctgacctcggcgcgcgccggcgaagccagcaggaacagggcgaagcaggcggacagcagggcaaagggacgcagggtcacggcggcactcacatgaaaggtggttagcgggtaatataataacgtctctaccctcgagcgtcgcagcccatgtacaagattgcgcccaagaccccgctggcctgccagccccatgaccacagccagtgcgtcagcaccgcgctggccgaggccgatgcgctgtgcgcgcgccagggcgtgcgcctgaccgaactacggcggcgcgtgctggaactggtctggcagagccacaagccgctgggggcctacgatatcctcgcggtgctcagcgaaaccgacggccgccgcgccgcgccgccgaccgtctaccgcgcgctggacttcctccaggagaacggcctggtgcaccgcatcgcctcgctcaacgcattcgtcggctgcaacaacccggagcacagccaccagggccagttcctcatctgccgcacctgccacaccgcgatcgagctggaacagccggatatcagccgggccatcgtcgccggagcgaacagcgtcggcttcgccgttgaaagccagaccgtcgaggtggtcggcctctgcggcacctgccgggaccagaaggacgcctgatggacaacgcgctggtgcggctgacccaggtcggcgtgtccttcaacggccaggcggtgctgagcgatgtcgacctggccatcgagcccggccagatcgtcaccctgatcggccccaacggcgccggcaagaccaccctggtacgcagcgtgctcggcctgctcaagccgcacgtcggcgaggtctggcgacggccgcggctgaccatcggctacatgccgcagaaactccacgtcgacgccaccctgccgctcagcgtactgcgcttcctccgcctggtacccggggtcaggcgcgagcaggcgctggcggcgttgcgcgaggtcggcgcggcgcacgtgctggagcgcccgctgcaaagcatttccggtggcgaactgcaacgcgtgctgctggcccgcgctctgctgcgcaagcccgagctactggtgctcgacgagccggtgcagggcgtcgacgtcgccggccaggccgaactctaccgcctcatcggcaaactgcgcgaccgctacggctgcggtgtgctgatggtctcccacgacctgcacctggtgatgagcgccaccgaccaggtggtctgcctgaaccgccatgtctgctgctcagggcaccccgagcaggtcagcggcgacccggccttcgtcgagctgttcggccaggacgctcgcagcctggcgatctaccaccaccatcacgaccacgcccacgacctccacggcgaggtggtcaaggccggtcccggcgccttgcctccaggcacccgcttcactcctgtccacaagcacggccccgactgcaaccatggctgacttcctgctcaacgccctcctcgccggcctcgccctggccctggtggctggccccctgggctccttcgtggtctggcggcggatggcctatttcggcgataccctgtcccacgccgcactgctcggggtagccctgggtttcctcctcgatgtcagcccgaccctggctgtgaccgtcggctgcgtgctgctcgcagtgctgctggtgaccctgcagcagcgccagccgctggccgccgacaccctgctgggcatcctcgcccacagcaccctgtcgctgggcctggtcaccctgagcttcatgagggaagtgcgggtcgacctgatggcttacctgttcggcgatctgctggcggtgagcgccagcgacctgctgtggataatcgccggcagcgcgctggtcctggcactgatctgcttcctctggcggccgctgctggcgatcaccgtgcacgaggaactggcgaaggtggaaggcctgccggtcggagcgatccgcctggcgctgatgttgctgatcgccattgtcatcgccgtggcgatgaagatcgtcggcgtactgctgatcacctcgctgctgatcattcccgccgccgccgcccagcgccatgcccgcagtcccgagcagatggcggtcggcgccagcctgctgggactggtcgcggtgtgcgccggcctggccctgtcctggttcaaggatacccccgccggcccctcgatcgtggtcagcgccgccggcctgttcctgctgagttttgtcctgccccgccgcacggtgtagaatctggcgattttttgaccaaacgagaacccgcaggaatgatgtcgtccttctttcgcctgctgtccgtcctggcggcggcgctgctggtcagcgcctgccagggcaatgcgtcgtcgcaaccgacgccggtggtcgcgccccaggcgcagcccgccgatccctacgccgaactgcagcaaaccctggccgccggcaagctcgaacaggccgagcaacaatggctggccctgcgcagcgcagccgccggcgacgagcgcgtcgaagcgttccgccgccagttggccgaggcctacatgcagcgcggggaaaccgcgctgcgtcaaggagacctcaacaccgccaccagcgccctcggccatgcccgcggactgatgcccaaagcgccggcgctgaccgccgggctggacggtgcgatcaaccgcgccaaggtcgatcccgcccgcgccgagcaggcccgacgcatgcagcaggcggcccagcagcagatgcagcagatcatccagacgccgcccggcggcgagctgaagccgctgcccggcgcttcccacctgatcgatccgcaagcggccagcagcgccgtgcccctgccgatgctcgacggcaccggccagggcggcctcggtgcggtgctcgacgcggtggccgcggatgtcgtcgcctaccgttgcagggtgcatatcgaagtgcgccgggacagcgactatccgctggtttccgaccagctcctggcgcgggtgaagaagctctcacccgatttcgacctgcatctcagccatgtcgtacaggccgacaagccaacccgattgatacttaccccccggaattgagaccggtcctgccccggccgcagcagaaagcgcttgtcgggagcgcaccagacgcttattccatttcaatgatttttcatcaccaataaatattaataatgcataagaaagcaaggtaaaatgctcggtttagctgaccgcccatgcttcccgccaagcccgtgctccagccgtaacagcatcgccgcacccacaaggttcgcccagtgatcgaattccacgacgtccacaagacctatcgagttgccggtcgggaaatccccgccttgcaaccgacccgcctgaacatccaggccgggcagattttcggcctgatcggccattccggtgccggcaagagcaccctgctgcgcctgatcaaccgcctcgaggagcccagcggcggccgcatcctagtcgagggcgaagacgtcaccgccctcgacgccgaaggcctgcgccgtttccgccagcgcgtcgggatgatcttccagcacttcaacctgctgtcctcgaagaccgtcgccgacaacatcgccatgcccctgcgcctggccggcggcttcagccgtgccgaagtcgatgcgcgggtctccgagctgctcgcgcgggtcggcctgtccgaccacgcgcgcaagtatccggcccagctctccggcggacagaaacagcgcgtcggcatcgctcgcgccctggcctgccggccgagcatcctgctctgcgacgaggccaccagcgccctcgatccgcagaccaccgcctcggtcctgcaactgctggcggaaatcaatcgcgagctgaagctgaccatcgtcctcatcacccacgagatggacgtgatccgccgtgtctgcgaccaggtcgcggtcatggacggcggcgccatcgtcgagcagggcgatgtcgccgatgtcttcctccatccgcagcacccgaccacccgccgcttcgtgttcgaggccgaacgggtcgacgaggacgagcgccacgacgatttcgcccacgtgccgggtctcatcctgcgcctgaccttccgcggcgaagccacctatgcgccgctgctgggcaccgtggcgcggcagaccggggtcgactacagcatcctttccggacgcatcgaccgcatcaaggacacgccctacggccagttgaccctggccctggtcggcggtgacctggaagccgccatgagccagttgaacgccgctgacgtacatgtggaggtactgcgctgatggacttcttcgaaaccatgagcttcgccaacatcgactggtacgaaatctggctggccagcgtcgacaccttctggatgctcggcggttcgctgctgttcacagtggtcctcggcctgcccctcggcgtcctgctgttccttaccgggccacggcagatgttcgagcagaaggcggtctacaccctgctctcgctagtggtgaacatcctccgttcgttgccgttcatcatcctgctgatcgtgatgatcccgctgaccgtactgatcaccggtacctcgctgggcgtcgccggggccatcccgccgctggtggtgggcgccacgccgttcttcgcgcgcctggtggaaaccgcgctgcgcgaggtcgacaagggcatcatcgaggcaacccaggcgatgggcgccagcacccggcagatcatctggaacgccctgctgccggaagcccggccgggcatcatcgccgccatcaccgtcaccgccatcaccctggtctcgtacaccgcgatggccggagtggtcggcgccggcgggctgggcgacctggcgatccgcttcggctatcagcgcttccagaccgacgtgatggtggtcaccgtggtgatgctgctgatcctcgtccagattctgcaaaccgtgggcgacaagctggtggtgcacttctcgcgcaagtaagcttgccggccaagcccaaaaccctgagcgccgcggttatccacagccgccaggaacacctcgaaaggagttgaagatgaaaaaactgcttgctgctttctccgctgtcgcggcgctcggcctcaccgccgcccaggccgccgagtccctcaccgtcgcggccaccccggtgccgcacgcggagatcctcaacgtggtcaagccgctgctggccaaggaaggcgtggacctgaagatcaaggagttcaccgactacgtgcagccgaacgtgcaggtctcggaaaagcgcctggacgccaacttcttccagcaccagccgtacctcgatgagttcaacaaggccaagggcaccgacctggtcgccgtgaccggcgtacacatcgagccgctgggcgcctactcgagcaagtacaagaagctcgacgaactgccttccggcgctaccgtggtgatccccaacgacgccaccaacggcggccgcgccctgctcctgctggacaaggccggggtgatcaagctcaaggacaacaagagcatcaccgccacgccgaaggacatcgtcgacaatccgaagaacatcaagatccgcgaactggaagccgcgaccctgccgcgcgtgctgacccaggtcgacatggcgctgatcaataccaactacgccctggaagccaagctgaacccgaccaaggatgcgctggccatcgaaggcagcgactcgccctacgtgaacatcctcgtcgcgcggccggacaacaaggacagcgacgccatgcagaagctggccaaggccctgcacagcgccgagatcaagcagttcatccaggagaagtacaaaggcgcggtggtaccggcgttctgagccaagccgcgtaaccgcccctggaaaaagcccggtcttcgaccgggctttttcttttccgtcccggccgtacgtctgcctgccgtgccacgacagaggtcattcggccgtttgcgggaaatgtagtgaaaaaaacattccgtcacatattgaacaatctgaaaaattcactacacaatcgacccaccttcgaggatgccccatgcaagaactaaaacaacgcctggcctccccgcccgccgaactgacgcccgcggagcgcaaggtggtgcgtgccctgctcgatgactacccgcgcctcggcctcggtccgatgacgcgcctggcccggcacgccggagtcagcgacccgacgatcatgcgcctggtgaaaaagctcggcttcgccggctacggcgacttccaggaagcgctgctggccgacgtcgacgaccgcctgcgctcgccgcgcaccctgctcgccgaacgccgcgagcggatgggccgcgacgacacctgggcgcgctacctcgaccaggctggccagagcctgcaacagaccctcggcctgacccgtcccgatgacatccagcgcctcgccgactggctgctcgacagccgcctgcgcgtgcactgccacggcggacgcttcagccgtttcctcgccggctacctggtcacccatctgcgcctgctgcgcccgcagtgccgattgctcgacgacggcgccctgctccccgaccagctctacgacctcggccgccaggacctgctggtcctgttcgactatcgccgctaccagagccaggcccagcacgtggcccaggccgccaaggcacgcggcacacggctggtgctgttcaccgacatctacgcctcgccgctgcgcgaacacgccgacctgatcgtcagttcgccagtggaatccgcctcgcccttcgactcgctggtgccggccatggcccaggtcgaggcactggtagcgaccctggtggcgcgcatgggcgcgccgctcgacgaacgcctggagggcatcgaccagctccgcaacgcgttcagcagtcatattctggaggaatgacccgatgttcagcctgccccaccactcgccgcgcgacctgccgttcggccgccggcagaccgccatcctgttcgtcgacatgcagcgcgcctgggtcgagccggggcgcgacccgcacgtcgatccgcaggcggccggctacttctacgagcgcgtgcagaaccaggtgatccccaaccagcagcgcctgctcggggccatgcgcgcagtggacgagaacgtcctgcacaccatcatcgagagcctcaccgccgatggccgcgaccgctcgctggatcacaagctgtcggagatgcacctgcccaagggcagcccggacgccagggtgatcgacgccctggagccgaccgccaacgagatcgtgctgccgaagacctcttccggcgttttcaactccaccgccatcgactacgtactgcgcaacctcggcacccgccacctgatcgtctgcggggtggtcaccgaccagtgcgtggacatggccgtgcgcgatgccgccgaccgcggctacctggtcaccctggtcgaggatgcctgtgccacccataccccggaacgccaccaggcctgcctggaagcgatcaagggctactgctggatcagcgacaccgagaccgtcctgcaacgcatcgccgccctcggccggagcaacctgtgaaccgcctgcagccggtacgcctggtcagcttcgtcaccaccgacctggccggcatcacccgcgggcgctcgctgcccctggcgaccctggaagagcaactggccagcggttgcggctgggtaccggcgaacagctcgctgaccccgcaggacctgatcgacgagagcagcccctggggcagccacggcgacctgcgcctgctgcccgacccgaacagccgggtgcgcgtcgagcagggtcccgacgccgctgcgccggcgctcgactacctacacggcaacctggtggaaaccgacggcacgccgtggccggcctgcccgcgcggcctgctgctggccgaggtggaacgctatcgcgacagcggcctgcaggtcatcgcggcgttcgaacacgaattcagcctgctcggcctgcccggcgagcgtccggccgcggcgttttcgctgcaggcccagcgtgccgccgggcagttccccggctggctggtcagcgccctggcccaggccggcaccgagccggagatgttcctccccgaatacggccagcgccagtacgaggtcacctgccgcccggcgcagggcgtggccgccgccgaccgcgcggtgaacgtccgcgaggtcactcgcgaagtggcgcggcagatgggcctgcgtacctgcttcgcaccgctgccggcacccggcgcggtgaccaacggggtgcacctgcacctgagcctgcaacatgccgacggcagcccgctgctgtacgagcccggtcgacccaacgatctctccgaactcggcgagcactgggccgccggcgtgctcgcgcacctgccggcgctgtgcgcgctgaccgcgcctaccgccgcctcctacctgcgcctgaaaccccaccactggagcgccgcctacgcctgcctgggactgcgcaaccgcgaagcggcgctgcgcatctgtccggtggtgagcgtcggcggcaagccgttgggcaagcagtacaacctggaattccggccgatggacgccaccgcctgtccgcacctggcgatggccgcggtgctgatcgccggccgcctgggcatcgaacgacgcctgccgctgcgcgccctggccgatgtcgatccgcacggcctcagcgacgaagagcgccaggcccgcggcatccaggccctgccggcgaccctcggcgatgcgctcgactgcctgcagcgcgacgagacgctctgcgccgagctgccaaagccgctgctggacacctacctcgccatgaagcgccacgaactggcgctgacggcgggcctttccgacgacgacctgtgccgccactatgccgagctttactgacaaccccgaactcggcatctaccagctgcctccctaccgcctgctcaaccccgaagggcgcagcccggtggtcctggtctgcgagcacgccagccggcacatcccgctggagttgcagcgcctcggcctggaccaggccgcggcggaagaacacatcgcctgggatatcggcgccctggcgctggccgaagagctttcccggcggctcgacgcgccattgctggcggccggctactcgcgcctgctgatcgacctgaaccgaccgctggaggcacccgacagcattccgccgcacagcgagatctacccggttcccggcaaccgcgagctgtccgagacggtgcgccgctatcgccaggattgcctgttccatccgttccaccagcgcctgacgcaactgctcgacgagcgccaggccgccggcgtgccgacccgcgtggtcggcgtgcacagttttaccccggtgtaccacggcagaccccgcccgctggttgccggggtgctttatcgcaacgccggcgcctacgccaggcgcatcctcgacggtttgcgccggcacggcctggaagtcgccggcaaccagccctatgcgatcgacccggcggaagacactaccgttccggtgcatggcgacgcacgcggtctggaagcggtgctgctggagatccgcaacgatggattgcgcacgccggatgcggtgtacgcctgggccgagcgtctgtatccctggctctgatgcgatgaccggcaccgccggtcgccaataacgagaaagaggcccgcttcgcgtgcggcgccgataacgacaatacgctgccttttcccgaggagcccgtcatggccatcgaacagttcggataccggcaacagctgcgccgcagcctgtccctgagcgacctgatcatctacgggatgatcttcatgatccccatcgccccgttcggggtctacggctgggtccatgccgatgcccacggcatggtgccgatggcctacctggtgggcatgctggcgatgctcttcaccgccctcagctacggagccatggccaaggcctttccgattgccggctcggtgtattcctacgcccagcgcggcatccacccccatgtcggcttcatcgccggctgggtgctgctgctcgactacctgctgatcccgccgctgctctacgtgttcagcgcgctggcgctgaaccacttgttcccggcgatccccaagctggcctggatgctgctgttcctggtctcggcgaccctggtcaacctgcgcggcatcaccttcgccgcccgcgccaacctgttgttcctgatcggagagctggtggtgctggcgatcttcctggtggtcggctaccaggcgctggaaggcggcctgggcaacggccggctgaccctcgaaccgctgtatcgcccggaagccttcgatctcggcctggtaatgaaggccgcctcgatcgccgtactgtcgttcctcggcttcgacgccatctccaccctcgccgaggaggtcaagggcgatcccgcccggcagatcggccgcgccgcgctgatcgcgctgttcatcatgggcggcatcttcatcgcgcagacctggctggccaccgacctcgccgccgggatgaacttcaagtcggcggacaccgccttctacgagatcgccgaagcggccggtggccagtggctgtcgatgctgaccgcggtagccaccgcgctggcctggggtgtcacggtgtcgatcacctcgcaggcagcggtctcgcgcctgctctactcgatggcccgcgacggcagactgccgcgcgcgctggccagggtccatccgcgctaccagacgccgcacgtcagcctgtacctggtggcggtgctgtcgctgggaatcggctgggccttcctcgacgcaccggacgtgctcacctcactggtgaacttcggtgccctcaccggcttctgcctgctgcacctgagcgtgatcaaccactactaccgccgccagcgctccggccagtggttgcggcatctactgttcccgctggtgggcctggcgatcatcgcctacgtgctgtacagcatgagcctcgacgcacagttgctcggactggcctggatcgcggtggggctggtctacctggcgttgctgcaacgcggcgggcgccaggcgccaacggagttggcgaaggatctctgacgcctcgcgagggctgcttcaggccggctcttcgccgacgaaatcgctgcggctgaggccatgccgcagcatcttttcgttgagtgtccggcgcggcagttgcagcaactccatcaccgccttgatatccccgcggcactggccgagcgcctggcgcaggcactccgcctcgaaggcttccatgcgttccgccagccccgaggtgaggccgccgccttcctccgcgtccccacgctccaggccgaggacatggcgctcggcggcgttggccagctcgcgtacattgcccggccagtcgtgggccatcagccgcgccagttccgccggcgcggcgggctgcggctcgcggccgaggcgctggctggcaacgctggcgaaatgttcgaagagcagcgggatgtcctcgcgacgctcgcggatcggcggcaggcgcagctcggcgacgttcaggcgatacaccaggtcctcgcggaagcgtccggcacgtgcttcggccagcaggtcgggcttggtcgcggcaatcacccgcaggtcgacgtggatactctggttcgagccaagccgctccagttgctgctcctgcaggacgcgcagcagcttgacctgctgcgccaacggcatgctttcgatctcgtcgaggaacagggtgccgccatgggcatgctcgagcttgccgatgcgcttgccctgcgcgccggtgaacgcaccgctctcatgaccgaacagctcgctctcgaacaattgctcgggaatcgccgcgcagttcagcgccacgaacggcttgtcggcgcgcggcccgaagtcgtgcaggcagcgggcaaccagttccttgccgctgccggtctcgccacggatcaggacgttcaccggggtcggcgccagggccagaacctgccggcgcaacgcttccatcggcttggacacgccgagcagacgcgcatcgacctggtccttgagactggcctgctccttcaggcgccggttctccagcaccaggcggcgcttttccagcgcgcgccgcaaactgccgagcaggcgctcgggcgtgaagggtttctcgatgaagtcgtaggcaccctggcgcatggcctccaccgccatcggcacgtcgccgtgcccggtgaccatgatcaccggcaggtcgcgatcgaccgcctgcaggttggcgagcagttgcaggccgtccatgccgggcatgcgcacatcgctgatgaccaccccggcgaaggacttgtccaacgctcccaggcattcctcggcgcgcaggcacaggcgcacctcgaagcccgacagctccagccattgctgcaccgcttcgcggatcgtcgcttcgtcgtcgacgaagatcacctggtcgctcatgtcgttacgctcgtgtcatcgggggccgccggcaggatcaggctgaacaccgctcccgcctcggcattggcgacctgcaggcggccgccgagttcgtggacgatcccataggataccgccaggccgaggccgagtccctctcccaccggcttggtggtgaagaacggatcgaagacgctgcccaggtgctcggcgggaatcccgccgccgttgtcggcgacgctcagcacccagtcgccgccaagccgttgcagggccaggcggatccatggccgctcctggccggcaacggcatccagggcgttgcgcagcaggttgaccagcacctgttccaggcggatcgcgtcacccatcacccaggccggccagagcagcgcctgctcgatctccacccgttcggcgcgaattcgcggcagcaacaactgctgcgcctgttcgaccacgtgacctaactcgatacgctcgcgcaggccgccggcgctcttgcgcgcgaaggtcttcaggtggccggtgagcgcggccatgcgttcgagcatctggtcgatgcgcggcaacgcctggcgcgcctcgtcgtggcgtccggcgtcgagcagcaggcgcaggctggccagttgcatgcgctgggcggtgagcggctggttgatctcatgggccagggccgccgacatctgccccagggcggccagcttggccgcctgcaccaggccgtcctgcgcggtacgcaggtcggcggtgcgctgctcgaccaggcgctccagctcctcccggctacgttgccgcaggcgggcgatacgccagcgctggtgcaggaacaagccgaggaagaccagcgccagccaagtgccggcggcggccaggcgcgcggtggcgacgtcgtcctggatgctcgcggtgtcgcgcagcaagtgcagggtccagccgtcgttgggcaggtccagcgattgccagaggtagtccttctcgccgtcggcgctttccacccgcgccagacggctgtcttcgccgtagctgcgcaaggtctggtggcgcaggggtgtcaggggctggcgatcgtattgccgggtctccgccagttcgaagcggtccacggtatccagcggttccagttcgcggtagcgccaaccggcgtggttggcgaggaacacgatgcccttggcgtcgctggccaggaccaggtcgggggtctggttccactgccgttccagatcgggaaactccagcttgaccacgattgcgcccaggaagctgccgtcctcggcgcgcaccgcgtgggacaggaaataaccgggaatcccgctgatcaccccgaccgcatagaaacgtccggagccttgggcgatggtctggcggaaatagggacggaaaccgtagttgtggcccacgtagctggtcggcaggttccagttgctcgccgccacggccagcccggtacggtcgagcagctccagggtggaggagcgggcggccaggttgatgctttccagcttgaggttgaggcgctgctgcaactcgccgtcgatcggcccggccagcgccgcgcgcaggtccggatccagcgccagtaccgccggcaggctgcggaagcgttcgatcagggtctgcagcgagccggcgtagaggtccagctgcttgcgcacctgttcgccctcggcgcgtagcgcctgctgccgcgcctggcgacccgcccagtccatggacagcagcaggccgccgagcagcggcagcaacagcaggaacaggcgcagcggacgggacaaggacatcggcggatcgaaacggcggcgggaagcggcgacgatagcacggcgcccggttacactgcgcgccgtacgaggagtccgcccatgtcgctatccccctggttccattcctgctcggccggtttcaccctgcgcggctggcgcagcgaaccgagcggcaagccgttgctgcatttcctccatggcaacggcttctgcggccgcacctacgaaccgatgctgcgtctgttggcggaggatttcgacctctggctgtgcgacatccagggccacggcgaaagcgaccacggcggccgcttccacggctggaaccgcaacgccgagatggcggtggaggccttcgaggccgggcgcggtccctatggagatgtccagcgactggcctgcgggcacagcttcggcggcgtcctcagcagcctcgtcctggcccgccatcccaccctgttcgcccgcgccgtgctgctcgacccggtactgttcaccccggcgatgatcggcgtgatggcactttccgagaccctcggcctgcaattgcgcggcagcctggcgaagaaggcgcgcctgcgccgcagccagtggcccgatcgcgcagccgcctacgccggcttgcgcggccgcggtatcttcaagggctggaccgacgaggcgctgtgggcctacgtggaatatgcgctgaaggagagcgacggcggagtcgagctgaagtgccggccaagccgcgaagcggagatcttcagctccttccccaggcggctgtggccgtcgctgggcaagatcaccacgccgacccgcgtgctctacggtgaccgcacctaccctttcgtcgccaagtcagtggcgcgctggtgctcgctcaacccccaggtcagcgcccacgtggtggtcggcggccactgcttcatgcaggaagacccggccgatgccgccgaacgcgtacgcgactttctcctgcccaatccatgaacgctccttccgtggggaatccggcgctcatccatcggtcccagggaggatgaccccacaggaccgagccatgcgccctctcctcttcagtgcccttctcctgctttccgggcatacccaggccagcgaatggaacgacagccaggccgtggacaagctattcggcgcggccggggtgaaaggcaccttcgtcctctacgatgtgcagcggcagcgctatgtcggccatgaccgggagcgcgcggaaacccgcttcgttcccgcttccacctacaaggtggcgaacagcctgatcggcttatccacaggggcggttagatccgccgacgaggttcttccctatggcggcaagccccagcgcttcaaggcctgggagcacgacatgagcctgcgcgaggcgatcaaggcatcgaacgtaccggtctaccaggaactggcgcggcgcatcggcctggagcggatgcgcgccaatgtctcgcgcctgggttacggcaacgcggaaatcggccaggttgtggataacttctggttggtgggaccgctgaagatcagcgcgatggaacagacccgctttctgctccgactggcgcagggagaattgccattccccgccccggtgcagtccaccgtgcgcgccatgaccctgctggaaagcggcccgggctgggagctgcacggcaagaccggctggtgcttcgactgcacgccggaactcggctggtgggtgggctgggtgaagcgcaacgagcggctctacggcttcgccctgaacatcgacatgcccggcggcgaggccgacatcggcaagcgcgtcgaactgggcaaggccagtctcaaggctctcgggatactgccctgacgctctgccgcctcagtcgccgacctttttctgccgggactgccgccactcgtcgaggcgaatcacctcggcgctatgcaccggcgggttgtcgacctcggcggccgcctcgaagcgatgcggggccaattcgatggcgccgaggtgatagccatacatgacgatgcgcccggcgtagcgttcctcgccgctgacggtgaattcgaaaccgaactcgcggctcagccgccactgaccacggtggtcacgggccaggcgcaggcgccggcgcgcgacattctcgtcgagcagttccacgccctgcttggcgcaatgctgcttggccagcagcaacgcccgctcgcgcacgccatgggcgcgccaccaccaggctgcggcggcgcccaacaggagcatgacgaaaaggttacccagggtcacgagcggaatccggtgtagggggacggccagcttacccgttctcccggcaggcagcgagtggggggtgttttcgccatgtgaattagcccccatactgcgccgactcagctgtaggaagtcgtctcatgccacgcacgccccacctgctcgccatccagtcccatgtggtcttcggccacgccggcaatgccgcggcggtgttcccgatgcagcgcatcggaatcaacgtctggccgttgaacacggtgcaattctccaaccacacccagtacggtcgatggaccgggcaggtgctgccgccggagcagatcccggcgctggtggacggtattgccggcatcggcgaactgggcaactgcgacgcggtgctgtccggctatctcggcagcgccgcccagggccgcgccattctcgatgtggtggcacggatcaaacaggccaaccctcgggcgttgtacctctgcgacccggtcatgggccacccggaaaaaggctgcatcgtggccccggaggtcagcgacttcctgctggaagaagccgccgcggtcgccgactacctgtgtcccaaccagttggagctggacagcttctgcgaccgccagccggactccctcgccgactgcgtggaaatggcacggagcctgctggcacgcggtcccagggcaatcctggtaaagcacctgaactatccgggcaaggccggcgacaccttcgagatgctgctggtggccgccgatcaggcctggcacctgcaacgcccgctgctggccttcccgcggcaaccggtcggagtcggcgacctggcctcggggctgttcctctctcgcctgctgctcggcgacgacttgcgtaacgccttcgaattcaccggcgccgcggtccatgaagtgctgctggaaacccaggcctgcggcagctacgagctggagctggtgcgggcgcaggatcggatcgcacatccacgtctcaaattcgaagcgaaaaaaatctcaccataaaaaattgctttaccatatggcattttgccccttgagcgcggtatacgatgagtccattgagtataattcctgcactggtatgcgttgcgttagccttgctgacctgtgggatcatccgctacctgaaacctattcctctgcccctctctcgcttcagtactatagatggactaagaggatacctcgcgttcttcgtttttctccaccacgcagcgatctggtattactttctacgaagcggtgcttggcaagtgccgccatcaaatctttatactcattttggtcaaaccagcgtaagcctgttcttcatgatcacaggctttctattcacccataaattattacaaagtaaaaaccgacccatagactggctgcagctttacatctctcgatttatgcgaatatacccggcatatatttttgccattgcgattatgtttacaatagcattcttcatgactggatatactcttcatgagtctgtgctttcgttgttaaagaaaactatccaatggggcgctttcagaactccggatattaatggcctcgtagaaacgagacgaataatggccggagtaacctggacacttccttacgaatggctgttctatctctgccttcccgccttgagccttctgatcgggcgtagagctccaatgactgctctggccacgaccattatcattgcgtcgcttatcctcagcttctggagaccgtctcccatactcctatgtatgttcctcgcaggaggtatcgccgcactgactgctaggtcagaatggttacagtcgctttcaaatggcagactgggaagcttattatgcgtgtgcctgatcggttccgctgtcattatctttccgacagcctataccttgggaccagcaattcttttaagcctagcttttatcttgataaccgcagggtgtagcatattcgggttactgaacctcagcgtatctcgcttctttggggaaataacttatagcctttatttgctgcatggtatcgttctttatgtgatattcgaaatagtcttgggaaatcaagcggcaaaagagttcgacacacggcaacactggatgatcatttatgcagctactccgatcactgttgttttatcttatctttcttttcggtatatagaacgcccatccatgagtgcttcaaaggggctcggagcccgaattaaaagtctattgcggaatacttaccgaccgcgtaccaacagctaaagaacgaatttccccaacatcaccccaccgatcaccatcaccgccatcagcacgaaagccatgcccaggcgccgctcgatcagggtcttcaggcgtgggccagcccagaacagcaaagcgcaggtagcggcgaagcgcaggctgcgggcgacaaggctgaggccgacgaacagccagaggtcgagctgggtcactccgctggtaatggtgatcaccttgtacggcagcggcgtgaagccgccgcccagcagcaccatcagccagcccagttcgttgtagcgttcggcgacctgttcgaagttctccagcaagccgtagaacgccaggatcggcatggccacgctatcgaacagcagcaagccgatgaaatagccggcgatgccgcccagcaccgagctgatcgcgcagatcgtcgcgtagcgccaggccttggcccggttggccaggaccatcggcaccagcaaggcgtccggcggaatcgggaagaacgagctttcggcaaaggtcaccccgcccagggccagctccgcgcgaggatggccggccaggcgcagggtccagtcgtagagacggcgcaacatgtcaggccgactgcggcagcggtgcgtcggcgccgcgctcgtcacggtcgagtcccaggcgatggaccatgccgcaggcgatctcgcgctcacccatgatcaccaggttggcgccgttctgctccaggtagtccacctcggcgtcgaaatgcgcccgggcgacgatgtccagcggcgggttcaccgcgcgggcgtggctggcgatctgcccggcctcgaagccgttgggaatggcgatcagcaaccagcgcgcctcggcgatgttggccagttccagcacgccgggactggcggcgttgccgaggaccacgctgtagccctgttcgcgcagttcgtcggccttgtcgcgcttgtccaccaccaccacgaagggcgtcccggcggcgcgcaggcgagcgctgaccaacccgccaacccggccatgaccgatcagcaccgcatgctcgcgctccaggatcggcggcggcaggtcctgcgccggcatctcgcggactccgccagcggcctccgccaggcgctgctccttgcgttgctgcaggcgatcgatggcgatgaacagcagcgggttgaccaggatcgacaggatcgccccggccagcaccaggtcgcggctctgctccggcaccagttcgaggccaatgcccaggccgatgagaatgaaagaaaactcgccgatctgcgccaggctggcggcgatcaccagtgcggtgctgttcggatggccgaaggcgcggacgatcaggtaggcggccaccgacttgccgaagacgatgaccaggaaggtggccaggaccgtcagcggctcctgcaacaggatcatcggattgaacagcatccccaccgagacgaagaacagcaccgcgaaagcgtcgcgcagcggcaacgagttctccgccgcctcgtggctgagttcggactcgttgaggatcatcccggcgaagaaggcgcctagcgcgaaggacaccccgaacagcaccgccgagccataggcgatgcccagggcgatggccagcacggccagggtgaagagttcccgcgaaccgctggcggcgatcctctccagcacccagggcaccatccggcgaccgccgaagatcatcagggcgacgaaggcggcgaccttgcccagggtaatcagcagcggccagagcagaccggcgtcgccgccgtcggtcttgccgccgagggtgccggcgagcgccggcaggagtaccagggtcaggaccatcgccaggtcctcgacgatcagccagccgatggcgatcctgccacgcttggtgtccagcaactggcgctgctccagggcgcgcaacagcaccacggtactggccaccgacaggctcaggccgaataccaggccgccgccgaagctccagccgagcagcttggccaggccgatgccaagcagcgtggcgacgccgatctgcaccagcgccccgggaatggcgatggccttcaccgagagcaggtccttgagcgagaagtgcaggccgacgccgaacatcagcaggatcacgccgagttcggcgatttcctgcgacagcgcctggtcggcgacatagccgggagtgaacggccccgccaggacgcccgcgagcaagtagccgaccagcggcgaaatgcgcaggcgattggccagggccccgaagaggaaggcgaggacgaaccccgcggcgagtgtggtgagtaacggcgtatggtgcatcaggactcccggcaacacggggaacgcgtcctccgcggcctggccggcggacgacgacgttcgaaatggatcacggacccgcgcccgtgacggcaaggcggaaaggctttccgccaacggagccgggcagagcgaccggcccatggcattcgagcgacccgacggcggctatggttcctggagaaacccggcgcgataccgacaggttaacccgttgacgtttctggagttttaacaggcacgccggtttcttatcaagaaatgtcaggaatggacgccagcagaggcaaacttctgcgttttcttatgaaaagctgcgaaaattcgcgaaacggcatcaggtccgaagcgggctcgaccggacaccggcagccttcctcaaccgtcttcgcgaatcgcctggtagcgggcctccagctccgcgcgcagctggcggcgttgctgggcctgggcgaagcggcgcttctgctcggcggtttccagctccagcgggcggacggccaccggcttgcgctcgtcatccagagcgaccatggtgaagaaacagctgttggtatgacgcacggactgctcgcggatgttttcggtgatgaccttgacgccgatctccatggaagtccgcccggtgtagttgaccgaagcgaggaaggtcaccagttcgccgacatgcaccggctcgcggaagatcacctgatccaccgacagggtcaccacgtagcgaccggcatagcgactggcgcatgcataggcgacttcgtcgagatacttcaggagggtaccgccatggacattgccggagaaattggccatgtccggggtcatcagcacggtcatcgacagttggttgtttccgggttgcatagcgctttttctctcatcaggacgggcgggggacaccatagacgcaaacgaagacggcagcggccacaaattttcaatcgtcatgatcgaaatcgcgccgggtcgtgcagacatccgcgggcttttctagactggcccttttccaccgggaatcgcgccaatgcctgccgccattcgcatccttctcctggccatggccgtgcttgccggcatcggtgccgctgccatccaggccgaggatacgccctgcgccaccgccgcggaatgcaacacgcgcggcacccaggcttatcgacaggggagttatccacaggcgctggacgccttcgcctggcaattgcgcctggccgagcgccaggaacagggcggagccgactcggaacaggcgctgaacaatctcgcgctgaccagcctcaaggccgggcaaccgggacgcgcccgcgcctggatgaacctggcgctggatcgcggctacagcggcaaggccacgcgctacaacctggaacaggttgccctgaaagtcgactatccgtccctccagggcctcgccgggcactacctgcgctacgccgggcaggccgaatgggaaagcctgcagatcgaaccggtgaagggcggctaccaggcgagcttcgccctgatgcgcatcggcaatccggagaaactgatggaatatgggcccgcggcggtcggcgagctgtccggtcggctggaggggcaaggcgcgctctaccggctgcgcagcgaaggcctgggcgccggctgcagcctgctggtatggcaggaaggcatcgacctgcgagtggtggagagccttggcgggaactgccagggttacggcggcatgggcatcgccgccgccggtaactgggtgaagatatccagtcaggccagggacgactgaaacttttccacaggccgctccagcggagcgacccgtggaaaatccactcagcggccagcggacaggccgaagtccaccgccaggtcggcgcccgtgatcgcttcggcctgagggccgcagagataccagaccagctcggcgacttcttccgggcggatgaagcgtgccgccttgccctgtggataatccttcagcagcgcgcgcttgtagccatccggattgcccatcccatagcgttcggcctggtagtcgagcatcggcgtggcgatatccgccggcgacacggcgttgacccgcacgccctgctcggccagttccagcgccagagtcttgctcagcatggtcagcgccgccttgctcgcgcaatacgccgccgaaccccggtaggcctggcgtccggagtcgctggagatgttgacgatgctgccctggttttccttcaggtagggaatcgcggcctggcacatgtagaaggaggccttgaggttgactcccaggaccaggtcgaaatcctcctcggtgaagttttccacaggcccctcgcgccagacgcccgcggcattcaccagggcgtcgagacgtccggtacgggcgagaatcttcgacatcagggtatggcagttatccgcgctgcgcaggtcggcgaccccgctggcgtccaacggcacctgcgcgttcagcgcgtgcaggccctccttatccacatccgtggcggcgatgcgccaatgactctgggcgaaacgcttggcgattgcccggcccaagccgccggctgcaccagtgataagaacgacgggcgtgctcatctgcttttccttactcctgtgccgcgtggaaaacaccgacggccaatcggccgcccgcttcaatgactgaccggcaacgccggcagccgttcattcaggcctggttgagataccagcgccagtcctgctcgccgacctcgcccatgaaggcacggtattcggcctgcttgatcgccaggtagatcttcaggaaatcctcgccgagcgcctcgcgcgcccaggccgagccctccagcgcgcgcagcgcggtcagccagtcgctcggcaacgcctgggtggcttgagcgtagccgttgccggtgatcggcgcaccggggtcgagtcgctcgcgaatccccaggcgcaccgccgcgagcaacgccgccgccgccaggtagggattggcgtcggcgccgcagatgcggtgctcgatgtgccggctggacgccgggccgccgggaacccgcagcgacacggtgcggttgttgattccccaggtcggcgccagcggcgcgtagctgttcgcctggaagcggcggaacgagttggcgttcggacagaacagcgccaaagactccagcaggcacgccttcattccaccgatggcctggcgcagcagcggggtcccggccgggtcctcgctggcgaacagattgttgccagcggcgtcggccaggctgacgtgcaggtgcaggccgctgccggaaagatcggcgaacggcttggccatgaagcaggcctgcaacccatggcgattcgccacgcccttgaccaggcgcttgtagcgcacgccttcgtcgatcgcctggagcgtgtcgaagcgatgctgcagggtaatttccacctgccccggcgcgtactccgaaatcgccgtgcgcgccggcaggccctgggcctcgcaggcggcatacaagtcatcgaggaatggctgcaactgctccagctcgtagacgccatagacctgggtcgcccgcggccgctggccattcatctgtaacgccggcaacggccggccgtcgctgtcgcgttcgcggtcgagcaggtagaactccagttccaccgccatcaccgggtggaaaccctccgcctgcagactgtggataacccgctgcaacacatgccggggatcgcccgccgcggccggtagcccgagctcgggatgcatgcttacctgcacctggccggtcggtgactgccgccagggttgcagggtcaggctgccgggcagcgggaaggtccagcaatcggcatcgccgacgtcccagaccaggccggtctcctcgacgtcatcgccattgatggtcaggccgaggatggtgctcggcagcggccgcccgctttcgtagaccgccagcagctcgtcgcgatgcagcagcttgccgcgcggcacgccgttggcgtcgatcaggaacagctcgatgctgcgcacctcggggtgtgcggcgaggaactcgcgggcttcccgcggatcggcgaaatgcatctcaggcctcccgcgcgccgggtatggcgagcagctcgccgagcgcctcgtcgaggctggagagcaggcggtcaacatcttcttcgcgagtgtccgggcaacacagggtcatgttgtggaacggcgtgatgaggatgccgcggttgatcagatacaggtgcaaggccatctgcaggctgtcgtggaacgccgcctcggcggccgcgccgtcgcgtgggggttgcgggcagaactggaactcgctgcgcgcgccgagctcggtcaccgaccaggccaggccgtgcttgtggataatcctgcggaagccctcggccagacgcgccgccaggggcagcatgtgggcataggcggtatcggtcatcacctcttccaggttggcgcgcatacagcgcatcgccagggcgttggccgacagcgtggtacccatgccgctgtggccgtggccttcgctctgctcgctggcacgtgccctggccagttgcatggcgctggccatcgccgcgctgcaaccatacaccgagcacggtacgccgccggcgatcggcttgccgagggtgatgaagtccggctcgagcttccaggcgcgggtacagccgccaggacctgtggagatggtgtgggtctcgtcgatgatcagcagcgtgccgtgacgacgggtcagctcgcgcagcttctggtggaagccgggttgcggcaggaccatgccgatgttggtcatcgccggctcgcagagcacggcggccacgtcttcgccggccagcgcccgctccagggcctggaggtcgttgaacggcaccgcgcggctgaactgggtgaggtcgtgggcctggccgagcaggccggagcgatgcacggtgcggccgtcgcggcagcgaaccagggtgtcgtcgaccgtgccgtggtagcaaccgtcgaataccagcaccaccttgcgaccggtgatcgcacgcgcccagcgcaggacgaagcggttggcgtcggtagcggtggtcgctacctgccagaacggcaggccgaagcgctgcgccagcagctcgcctgcgacgatggcatcctcccccggaagcatggtggtcaggccgttcgcgccctgctcggcgagcgcccgggcgatcggcgccggagaatggccgaacatgctgccggtatcgcccaggcagaagtccacgtaggcgtggccgtccacatcatggaaacgcgcgccgtaggcacgcgccacgaacagcggacagggtgttgaccaatcgctcatccagtgcatcggtacgccgtcgaacaaggcgcgccgggctcgctcggcgagcgcgacggactgtggattctgcgcaaggaaacgttgctgctcgcgggccatgaaggtttccacggcggcttcggcgatgccactggcggtcatttcgaacacctcgttttttatttcgcacaactttcatttgtgatcacaaaaaagtcaatacagtatttgaaagcactgataatctgttttccatatcaattttgtgatcacaaaaatgaatgacttttcgaagtggacaggccaggtcgcgctcatcagcggcgccggcagcgaactcggcatcggtttcgccattgcccggcggctggcccgcgaaggcgtgcgcctgctgatcaccgccagcagcgagcggattaggcaacgagcggaggaactgagcgcatgtggtcacgacgtgcgcgccgcgagcgccgacctgaccgacgaagcccaggtgcagggcctgctggactgggccgaagcccagtggggacgggtcgacatcctggtgaacaatgccggcatggcccagttggacagcgcggagcccttcagcgcagtggaagcgacctcgctgcgggattggcaactgtccctgtcgcgcaacctgaccagcgctttcctgctcacccgcggcctgctgccgggcatgcgcgagcgcggctacgggcgcatcgtcaacgtcgcctccaccaccggaacccgcggcagcaacccgggcgaagccgcgtatagcgcggccaaggccggtctggtcggctggagcatgggcctggcgctggaggtggcgaagagcggcatcacggtgaacagcgtcgcgccgggctggatcgccaccgcctcgagcaccgccgaagaacgcaaggccgccctggccagccccagcggacgtgccggccggcccgaagaggtggccgccgcggtggccttcctcgcctcgcccgaagccagcttcgtcaacggcgaactgctggtggtggacggcggcaactgcctgatcgaaaacaaacggagctgaacatgcgcaactgcaacctgacgctttcccagcttccggcgccaccggcgacccggagctgaccatggccgagaatctccaggaacgactctaccaacgactgcgggaagacttgctggccggacgtttccagcccggcgagcgactgaagatccgcgacctggcgaaccaatggggcaccagcccgatgccggttcgcgccgccctgcaacggttggtggcggaaggggcgctggagggcgaggcacaacgctcgctcagggtgccgctgatgacccgcgagcgtttcctgcagatcctccaggtgcgcctgtccctcgaagggctggcggccgaaagcgccagcggccggctggacgagcaggcactggaaggactcgaaggttgtctgcggcgaatggaggacgccttgcgccgacgcgaggtacaggcctacctggaagccaacagcgaattccacctgacgctctaccgcgcctgcggcaacccggtgctgctgcgtctcatcgagacgctctggctacaggtcgggccgttcttcaaccggctgttcaccgaggccgacctctccctacgtctgaacgatttccacgaggacgccctggacgcgctacgccgcggcgacggcccggccgcgcgcgcggcgatcgaacaggacctggcctacttcggccagtacctgctgaacctcctggagctggaggcccggccacgaaagcgacaccgttccggcgagcacgcctgacgggagataagcgccgctactgcgggcgaatggtgcgcacattgtccttcttgatcagaatggtgtcgccattcagctgttcgaactcgtagtagtcattgtatttgtcgtaatccgactgatccttgaccaggacctcgctgccatcttgcaaagtgaccaccgcctggttggcgcaacccgccaggctggtcagcagcaatgcagcgaacagagctttgaacttcatagaatctccacacggggcagcgcacttgcctacatccggagcgacaagtgcggaattgcccttgtgaccgtcgcaatcgagggaaattccttagcgcagcggcgctttgtcggagacgaagcgccgacggcgacgcgctgggcctccaggcagcctcgcgcgacgtcggggagtcagcggcaaaggcgcgttgcagagcctttgcggtggttcaggctcagctctccagccagacgtcgcgagcccagacccacaccgaatcccagctttcatcggtgaggtcgccatcggcccagagcaccacctcgccgtcctccgccacgcagtagtagctgccgtcgtcctcgcaaagcgggatcagctcgcgcggaacgcccaggtcccaggcagtggccgccacttcgggcaggtaggtgtgcgagtgcggatcggtgacggtcaccggctccaggcggccgtagaccacatcgctgaccagcaggagaaattcgcggaactcggcgggaatgccgatcagcagctcttcctcgatttccaccagcagttcttcttccggcagttccaggggcaccggaaccggttcgttgagttcacgcagtttttcgatgacgtcttccacgacaggctctctcgcaacgggtggcgcgctttttatacagtagccgcaccgagcgcaagacaagtgtcgcggctggccttcggccatggcgccggacgaatggtcggtcaacccgccaacggagatgaaaaaacccccgttccctggcggaagcgggggtttcggcggcccccgaagggaccgcaaccactcgggatcagttctgccggataccggccaccagccatggctggttctcgccctgggcgcgctccatccgccagctttcgctgaaggcttcgccctggtcgaagcgcgaggtcttcgacacaccgctgaaggtcagggtggcgatggtcttgtcggcctggtcgtcgacgccgtccagttgcacgaccaggttgtcgatgtaggtggactggtaggcgtcgccgatctcggcgcgctcctgcttcagccattgcaacatctgcggggtgacgaactcggcgatcttgtccatctcgttggcatcccaatgctgctgcagggacatgaagtgttcgcgagcggcaccgacgaagcgctcctcgttgaaccagctcggcgcgttgatcaccgggctcggcgcagcggcagcagcggcggcgccaccgaagatcggcgcctgggccggcatttcgcgctgcatcggcgcgtgcccggccattgcaggctggccctggttctgctggcgccggcgagcggcgatgaagcggaaggcgatgaaggccaccagggcgatcaacaggatgtcgagcatctggatgccctcgaagccgtcgcccatgaacatggaagcgagcaggccgcccgcggcgataccggccagcgggccgagccagcgcgaagcaccgctggcggcagcggcgggacgagcggcgttgggggcggcagcagtggcgttcggcgcagtggccggctgcgcctggcgggtctggtggctgggtgccgagccgaggctcttgccgccgccgaagcgcttggcattggcatccaggctgacggtcagcgccaggcagaaggcgagggcgatgctgagaacacgctgcattgtagtctttctctcttgggggaatcgacgcgcgccatgttgcggcggtacgggcgacaggaccagccggattttgtttcgggctattgctccccggccgccgttttttcgcccgccgcgtctggctcgcgggtcggcgccagggtacaccctcgttgccggggacgacaggcatgcacgcggatcggcgcgcgaagatccgcccggcgacctgggaagcacaacgcagagcctcgccgaaacgtctgttacagtttttttcagcccaccgatcaagcacttgcggatgctagtctgcgggtctgcgaggccgcccggtcgccgcgtctgccgacccattccccgagcgaggaccgccgccatgcatgccgtcgatttcatccaggacctcgccgtgatcatgctggtggcgggtgtggtcactatcctcttccaccgcctgcgccaaccggtggtcctcggctacatcgtcgccggcttcatcatcggcccgcacaccccgcccttcggactgatccacgacgaagacacgatcaagaccctggccgaactcggggtgatcttcctgatgttctgcctcggcctggagttcagcctgcgcaagctcttccaggtcggcgccacggcgttcatcgcggcgttcctggaaatcgtcctgatgatctggatcggcttcgagatcggtcgcttcttcgagtggagcaccatggactcgctgttcctcggcgcgatcctggcgatctcatccaccaccatcatcgtcaaggcgctcggcgacctgaagatgaagaacgagcgcttcgcccaactgatcttcggcgtgctgatcgtcgaggacatcctcggcatcggcatcatcgccctgctgtcgggaatcgccgtgagcggttcggtggaaaccggcgaggtgttctccacggtcggcaagctcagcctgttcatgatcgtcgcgctggtcgtcggcatcctcctggtgccacgcctgctggcctacgtggcgaagttcgagagcaacgagatgctgctggtcaccgtgctcggcctgtgcttcggcttctgcctgctggtggtgaagctggaatacagcatggtgctcggcgccttcctgatcggcgcgatcatggccgagtcgcgccagttggtgcagatcgaacgattgatcgagccggtccgtgacatgttcagtgcgatcttcttcgtcgccatcggcctgctgatcgacccgaagatcctcgtcgagtacgcctggccgatcgccctgatcaccgtcgcggtggtgctcggcaagatgttctcctgcggcatgggtgcgttcatcgccggcaacgacggacgcacctcgctgcgggtcggcatgggcctgtcgcagatcggcgagttctccttcatcatcgccgccctgggcatgactctgaaagtcaccagcgacttcctctacccggtggcggtagcggtctcggccatcaccaccctgctcaccccgtacctgatccgcgccgccgacccgctctcgcagcacctggccaacgccatgccgcagcgcatggcgaggatcttcggccactacggcgactggctgcgcagcatccagccgcagggcgaccgtgcggtgctggcggcgatgatccggcgcatcttgctgcaggtcggggtgaacctggcgctggtgatcgcgatcttcctcgccggcggttatttcgccgatacgctttccgcctggatgagccagtgggtcgcctacgacgggctacacaaggcattgatctggggcggcgcgctgctggtctcgctggccttcctgatcgccgcgtaccgcaagctcaaggccctgtcgatgctgctggccgaactcggggtcaagccggagaaagccggacgccatacggcgcgggtacgtcgggtgatctccgagatcatcccgctgctgtcgctggccggcatgatggtgctgctggcggcgctcagctcgagcatcctgccgccgggcgagttgctggtcgtagtggtgctggtcgccggcctggtgatcgcagtgctctggcgctggctgatccgcgtgcattcgcggatgcagatcgcgctgatggaaaccctcgaccaggaaaagggcagccactgagagccaagcgatcccggcctgccgtcgaatcggcggataaccacgctgcggttattcgccctcgcctgcacctggtgtcgctatcggaccctttgccctgaaggatcggcggatttccgcttatccactctcccggtcggcggactcccgctcggccaagaccaccccgctcctcttccaacccagtccccacgcggctttcccgcgttggcacggcacctgctatcgagccatccaatacgtcgccctcgcgatgtgccggtgtgctgcgccctgatcagcacatccaagacaacaacgaaaagaggaaacacgatggaaagcgccaacgccatttccgcgtctgcccagccccgcaccacttcgcaacgcatcaagtcgatcttcagcggttccgtcggcaacctggtcgagtggtacgactggtacgtctacgccgccttctcgctgtacttcgcaaaggcattcttcccccagggcgacatgaccgcccaactgctgaacaccgcagctatcttcgccgtgggcttcctgatgcgcccgatcggtggctggctgatgggtatctatgccgaccgcaagggccgcaaggcggcgttgctggcctcagtgctgctgatgtgctttggctcgctgatcatcgccctgacccccagctatgaaaccatcggcgtcgccgcgccgatcctgctggtggtcgcgcgcctgctccagggcctgtcggtcggcggcgaatacggcacctccgccacctacctgagcgagatggcgaacaaggaacagcgcgggttcttctccagcttccagtacgtgaccctgatttccggccagctcatcgccctggcggtgctgatcgtcctgcaacagaccctgaccgtagaacaactggaaagctggggctggcgcgtccccttcttcatcggcgcgctgtgcgcagtggtggcgatgttcctgcgtcgcggcatggaagagaccgagtccttctcgaagaagaaggaagagccgaaggaaagcctgctgcgcaccctgctgcgccacccgaaggaagtgctgaccgtggtcggcctgaccatgggcggcaccctggccttctacacctacaccacctacatgcagaagtacctggtgaacacggtaggcatgagcaagaccgattcgaccatgatctcggctgccaccctgttcctcttcatgctgctgcagcccatcgtcggcgccctctccgacaagatcggccggcggccgatcctgatcgccttcggcgtactcggcaccgtcttcacctacccgatcctcagcaccctgcacagcgtcgacagctggtggggagcgttcttcctgatcatggcggcgctggtgatcgtcagcggctacacctcgatcaatgcggtggtgaaggccgaactgttccccaccgagatccgcgccctgggcgtcggcctgccgtatgccctgaccgtgtcgatcttcggcggcaccgccgaatacgttgccttgtggttcaagagcgtcggcctggagagcggcttctactggtacgtcaccgcctgtatcgcctgctcgctgctggtctatgtgttcatgaaggacacccagaagcactcgaagatcacgaccgattgattgagcctcgtgctcatggccccgacacactccgggcctttttatccacaggacggcgaccttcgggtcgccgtcctgctttttggcgcggcaaccgattcccccacacccgccgactgttggtctacggcacggcatcccgaccggagccctagggcgcgcaacgccggcggcgtaatcatccggtgtccctgcgttccacggcggataaccgcaagcggttattcgccctgcggctcgtcattccggcggggctggaaccttggcgcgcaaacgccgatctcctcgcgttcccacggtggaacagcgcaaggggcctgccgtccccaggcagcgaagccccgtctgcgagacctaccgggaataaaaaaaccgcgctcgaaggcgcggctcttttcgttgtcagagaaccgcctcagcggcgcttctcgatcttgaagaaaaacatcttggtcgcctggcgggcgacgatcttgccaccactgacacgcggctcgaaacgccacttggccatggcctggcgcacttcgcggtcgaacatgcgcgacggcaccgactccagcacctggatgtcgtcaatgcggccatcgctggtgatggtgaacagcaccttcacccggccttcgataccccgggcctgggccatccggggatagaccggaggatccatgcgcaacggcttgatgtcactgtcgttgaggctgccgctgggcaggccggccggaccttgcgagccgctgggcgcggtctgcgcgccgggcgtgctctgcccgacggtaggtgcgggcggcggcggggcggcgctggacgggctgggctggctggatgcctccgtgctcggctcgggttccggcttgggtttgggttccggcttcggcttggccttcggaatggcgttttccaccggtttgggcttgggtttcggcttgggcttgggtttttccaccggcttcggcttcggcggctccggcttgggttcctcgatcttcggcggcgtcggctccggcgcggcagccggcggctgcggggtcggctcggccttcttctcgagctggacgaaattcacctgcatggtcttcggcagttcgccgtggccaaggttgagttcggccggggtcggcatcacccacaccagcgcaccgatgatcgccacatgcatcgccaccgccgcgccggaggacaaccaccagcgcgacttgggcggctcgccggggacgtcttcgggatcgctgccatgggcgtaggggatcagcacttcctcgaccgccacttcctcgtcgcggcgcgcgccggagcagtccaccatgcgcaggttgggttctccgcgctgggcattcacgcatggcagggactcgctttcgtctccctgggcgggagcggtggggtggtcttcggcgagcgcggccagcgaaaaacggtcaggcgaccgtgaaggctgtggcgacatgagggcgacctgcggagaagtgaaaggtaaggaagtagagtcttctgataattattatcattcagtcgcgtcctcagggcaaccttggcggatcattccgcgaccatccgacacgccaggaacgcctcttcgagcgcctcttcatccgcgcctgcggcgaggatcagttccagccgattatcccgccgccacgaggatttgccccagttatccacaaacggcgcggcattcgctgcataccaaccgtccgcgcaatgcagcaccgccttggcccgccgcagtccggacaaacggttcagccaggcgtccactgcgacccgatcgaaacgcaccgacggcgccagccgccagccgatggcgaactggccgtcctgctcgcgcacggcgcgcagcggtcgctcggcgggcagcaccgttcccaactgagcaggcgcctccggcagggccgcccaggtcgtcgcgctaccttccccggcaacgctggtcggcagatcgcgcaatgccaggtgaccgcgcacgctccagcgcaacggcaggaccggcaggcgcgcacgcacggcgcagcgctgcgtcgcgtcgagcgtttcggatttgttcagcagcaacatgccggccgcttccagcgcctgttcctgtgcctccggcagcggttggccggaggccagcgccgcggcatccagcaccactaccaggggttgcagggccaggacgccggaccagggaggagcctgcagctgtttccacagcgcctgcggatgtcccaacccggagggttcgatgaacagccggtccggccgtgcccgacgcaacaagcgaccgagccccacctggaacggcacgccattgacgcagcagaggcacccgcccgccacctcgccgatggccacgccgtcgacgtccgtggccagcagcgcggcatccaggccgatctcgccgaactcgttgaccagcaccgcccagcgctcgcccgccggcttctgcgccagcagcgagcggatcaggctggtcttgccggcccccagggggccgccgatcaggtgtgtgggtatctctcgaagcatctgcgcaaccggaatgtgaaagcctgtggatcaatgcggtccttgcctgcggggagccaggccccgtgctagagtcgcgcccgtctgcaatggagtcctcgcatgcgtccgttcctgttcttcctgtcctgcctgccgggcctggccctggccgaagcctgcatcgtccatagccaggcgaagaatctcgacgtgaaggtctgccagcagaaccgcagcatcccggccaagctgttccacgaaggcttctgccagccacaactgcagggccagaaggtcgaggtgacgttcgccgaggagtgtccgacgggcgccttcggtgtctgccgcgacgccagggtacccaacgcgccctatcggcaggacatcttctactacggcatcgcgaccgacgcacgctacctggagccgttctgcgccagccagagccaaggtcgctgggaagagcctagcgccgcgaaaaagccctgagcgcgtcatcagcctgtcacagcgtcagggctaaatgggagtcgggtacctcagcacccttcgtccccatccccaaggtaggacgactttttggtgataggccatctgcggatggcctttttttattcctcgaaagacacttgtccacaggctcaggcaagccagtccagggtcaacagcaggcgcgccagcccgggctccgctcgcggcgagcgatgcaccagcccggcaccttcgttaccctcccagcgttcgcccttgagcagcgccacgtcgcccgtggacaagctgtgtataagctgttcatcgacaacttccgcctgcgctccgccaagcagccgacggtccaggccggactcgtccagccattcgctggcggcgccctggtaggtggtgaccagccgcagcggcacgtggtcgacgtggaaacgcgggcacatcggtttatccagaacgcgcaggcgcaggccgatacgccgcgccccggtcaggcaggagaaggcctcgaccagccagcccaggtcgtcgaggaaatcggtttgtcccggcagttgctgcgcgtcgagcaggccgtccaagacgggtagccgttcctcttccatctccagcgtctggctcagcgccagtcccggccggttgcgcaccagggcggcggcgaagtcgcgcagcgccgggctcaaccggcgtgtccagaccgccaggttgacgccctcgcgaagcacctcggccagcacctgggggtcgtcatcgaacgcctggcgcggcaacggtttttcctgcggcagtgcgctcatgcggcgtgcccccagtcctcgaaggggtcgtccaggccctgccagccggggatgcccaggttcatctcggcgtcatccagcaggcaggcgtccagggctgcgcgcagggccgcgaagtccaggttctgaccgatgaaaaccagctcctggcgacagtcgccgacgccttcctcccagtgccgcatgatcgcccgcaggccctcttcgtcctgtggccactgtccggtcggcacgaagcgccaccagcggcccgccaggccgtaacgcatcaggccgccggcctgcgaccagctgccggcctcgcggggccggctggcgagccagaagaagcccttggagcgcagcagccgcccctgcttcagcggattgtgcaggaaggcgtggaaacgcgcggggtggaacggccggcgcgcccggtaggccatggaggcgatgccatattcctcggtttccggcaggtgctcgccgcgcagttccttcagccagcccggcgcggacgccgcgcgatcgaaatcgaagcgaccggtatcgaggatcttcgccagcggcacctgacccatcaccatcggcaggatctccgcctcggcattgagctggcgcaggatcgccagcagttcctcgcgctgctcgctggagatcaggtcgatcttgctgaccaggatcacgtcggcgaattcgacctggtcgatcagcaggtcggtgatcgagcgctgatcctcctcaccgagggtttcgccacgattggccaggctggcggcctcctggtagtcgcggagaaaattcatcccgtcgaccaccgtgaccatggtatccagtcgcgccacgtcggacaggctgcggtccagctcgtcgcggaaggtgaaggtctcggccaccggcatcggttcggaaatcccggtggactcaatcagcaggtagtcgaagcggccttcccgggcgagacggccgacctcttccagcaggtcttcgcgcagggtgcagcagatacagccgttgctcatctccaccaggcgttcttcagcgcggttcaggctgacatcgcgctggacctcgctgccatcgatattgatttcgctcatatcgttgacgatcaccgcaacccgtcggttctcgcggttcttcagcacatggttgagcagcgtgctcttgccggcgccgagaaagccggacagcacggtgacaggtaggcgttggttcacggttggtaacctcttcagttgtgccgcacgtggcgttcgcgcttctcctggcgctctttcgcctcgatgcagagggtggcggtgggacgcaacagcaggcggcgcaggccgatcggctcgccggtttcctggcaccagccgtagtcgccgcgggccaggcgctccagcgcttcgtcgatcttgtcgagcagcttcttctcccgctccagcaggcgaagttgccattgccgctgttcctcgcgggaagccaggtcggcctcgtcgctggggcgttcgagatcgcgcagctcgccgaattcgccttcgatgcgcgcctgaagttcctggcgctgacgcagcaacaggtcgcggaagaagtcctgctgggtttcgtccatgtaggcagcgtcgggctgggcaagcagttcctgttcggtcatgggctgaacctgggaaatttaaaacgttatactataacaattaacaccacaatcgatggcccgccaatcgccttccggctaccctgggcccacgtcatcccgggatccaccgatgcgccgcgtcctccgcctttactgcctggccctcctgctgctcgctccggcggcacaggcgcagggctttcttcccggcacccgcccggcggaatgcgcctacctgcgtaccgttctggcctgcatggatcggctgggcaaccactacagcgtcgccaccggcggcaacgacacctggctgcgcggctacgacgcggcgagcggacgacgctgggcccagaccaatacgcgctacgggcgcctgaccttcttcagcggcatcgccagcgatggggaaatctgggtcggcctcagccgcaacatcggctggaccagcatcagccgcctgagcagttcatcgggccagcgccaacgcctgacctgcgggcgggtcagcggctgcagcgaaggccctagccgggaggctgcgcgctgagcgccgccaggtagctgccggcgggagggcgttgccggaagtagccctgcacgccagcgaagatcgcctcggccaggcgctggcgatggcgttcgtccatcaaccggcgacaatcgccgcgattcgagatgaagccggtctccaccaggatcgaagggatgtccggcgacttgagcacggcgaagccggcctgctcgacacgcttctggtgcagcgcggtgacgtccgacaactggccgagaacgctgtggccgaggtccaggctgctggcgatggtcgaactcagggccatgtcgaggatcaccccggcgagtaccttgtcgcggccctgtagcggcaggttgccgctgttgccgatcaggtcggcgccgttctcgcgctcggccatccagcgcgccatggtcgagctggcgccatgctcggagagggcatataccgacgcgccggaggcggtcagtcgcggcgccgcgtcggcgtgcaccgaaacgaacatgtcggcgttgtagcgccgggccacttccggccgcttgcgcagcgggacgaacacatcgccgttgcgcaccaggcgcgccttgaagcctttctcacggtcgatccgccgcgccagcaggcgggcgatggccagcgccacgtccttttcgcgctcgcccttgctaccgaccgcgccggggtccttgccgccatggccggcatcgaccaccacgaggatgtcgcggcccgtcgagggtagcgggcgggccagcgccagcattggctcggggggcgccgccagcgcctgtggatataggtccaggaccaggcgatggccctttcccgcctgcggttccagggcgaagctgcgcggcctgaccgcctggcgcagatcgaggacgatgcgcgtcccgccgccacccagttggccactgcgtatggcgcgcacggggccgtccagcggtagctcggagagcgttgcgagcaattgcgcgtcgggcaggtcgaggatcaaccgctcgggggcctgcagggaaaaggttcgataacgcggcgggccgtccagttccagcaccaggcgccagctttccgaggaattccaggcccgggcctggcggattcgtacattggcgctggcggccaggaacggctggagggccaggccggcgagcaggctttgcaggagacgacggcgcttcatcgacgaaatacccgattgcaagggtcggcattagctaatacgttatattataacattcaagccatttccaggccttgcctacccttcttcgagttctccatgaatgccttgacgcttcccgatatcgcccgccagaccaccaccgccgatcttcccctggactgggtcggcatgcagggcatcgcccttcccgtgcagatcggcgggcagagggtcgccgccgaagccgatgccggtgtcagcctggacgacccgcaggcccgcggcatccatatgtcgcgcctctacctggcgctggccgaactggaacagggcgagctggacctttcctgcctgcgcgccgtcctgcaacgcttcctcgacagccacgccggcctgtcgcgtcgcgcctacctgcgcctacgcctcgcgccgctgctgcggcgtccggcgctggtcagcccgctgagcggctggaaacgttatccactggtgctggacacgcgcctggaaggcgatgacttccaggccgaagtccatctcgagctgacctactcctcgacctgcccctgttcggcggcactggcccggcaattgatccaggagcgcttcgaccaggacttcgccggacagccgctcgatcatgccagcgtgctcgcctggctcggcagcagcgccggcatcgtcgccaccccgcacagccagcgcagcagcgcgcacctgcgcatcggcctggcggaagactgcatcggactgcccctggaagagctggcggatctcggcgaaagcgccctcggcaccgcggtgcagactgcggtgaaacgcgccgacgagcaggccttcgccctcgccaacgggcagaacctgatgttctgcgaggacgcggtgcgccggctgcaccgcgccctgcagggttatccacaggcgagccggttctccatacgggtcgtccatgcggaaagcctgcatgcccatgacgccgtcgccgaaagccattggcagcgaggtgcagcatgatccgcaagaatccctccggcgacctaccggtgatcgacgaatcggcctatgtggacaagaccgcgatcatctgcggcaaggtgatcatccaggccaacgtcttcgtcggtccctacgcagtgatccgtgccgacgaagtcgacgccgacggcggcatgcaaccgatcgtgatcggcgccaactcgaacatccaggacggcgtggtgatccattccaagtcgggtgccgcggtgaccatcggcgagcacagctccatcgcccaccgctccatcgtccacggtccttgcgaagtcggcgaccgggtcttcatcggcttcaacagcgtgctgttcaactgccgggtcggcgatggctgcgtggtccgccacaacgcggtggtcgacggctgcgacctgccagcgggtttctacgtaccgtccaccgagcgcatcggtccgcgcaccgacctggcgagcatgccgcgggtcagcgtttccgccagcgagttctcggaagacgtggcgcgcaccaacgtcgacctggtacgcggctacaagtcgctgcagaacgagttctgaacatgcgaagcctgctgatccgcaatgcccggatggtcaacgaggggcaggtacgcgaaggcgatctgctggtccgccacggtcgcatcgaacgcatcgccggctgcctggaaaactgcggcgccagccgggagatcgatgccgccggacgctacctgctgccgggaatgatcgacgaccaggtgcacttccgcgagccgggttatccacagaagggctcgatcgccagcgaatcccgcgccgccgtggcgggcggcatcaccagtttcatggacatgcccaatacccgcccggcgacgctgagcctcgaagcgctggcggaaaagaagcgcctcgccgccgcccatagcgtggccaactacggtttccacttcggcgtcagccgcgacaacctcgacaccgtggccgccctcgatccacgcgaggtcgccgcggtgaaggtgttcatgggcgcctccaccggcgacatgctggtggacgacctgccgaccctggagcgcctgttcgccagcgttccgaccctgctgctgagccattgcgaagacacgccgcggatcgaagccaacctggcgggctggcgacaacgcttcggtgaacgtattccggcagccgcccacccgcgcattcgcgacgccgaggcttgctaccgttccaccgccctggcggtggaactggcgcaacgacatggcacgctgctgcatgtcctgcacttatccacagcgcgtgaactggccctgttcgaggacaagccgctgtgccagaaacgcatcaccgcggaagtctgcgtccaccatctgctgttcgacgacagcgactacgcccgcctcggccatctgctcaagtgcaacccggcgatcaagagccgcgaggaccgcgatgccctgcgcagggcgctggccggcaaccgcctggacgtgatcggcaccgaccacgcgccgcacgcctgggccgagaagcagcaggcttatccacaggcgccggccggcctgccactggtccagcatgcgttgccggcactcctggagctggtccgcgaaggctggctgtcgctggccaccctggtggcgaagaccagccaccgggtcgccgaactgttcgccatcgccgatcgcggtttcctccgcgaaggttactgggccgacctggtgctggtcagcgaactggagcacccggcgctggccagcgccatgccgctgctgtcgcgctgcaactggacgccgttccgccaccgggcattccaccatcggatcgataccaccatcgtctccgggcaactcgcctggcacgcgggacgcctgtccgacgattgccagggactgcccctgcggttttcccgctgaagtcttgtccacagcctgctgtggatatccgttagcccacggccctagcgcagggctttcaccgccgcgccaaggaaggcataggtctcctcctcgcgatcgtccatctccggcttcggccaggcgctccagaccaccgccacgatcttctccttgcggttgatgtagaggtactggccgaagatgccctgggcttcgaaggccccaccgtcatgctcgggcagggccttggcgcccaccgggaaggtccaccactggtagccgtagccgagcgcgtattcgccatcgtagagcttgcccggggccaggtgggaagaagcctcgacgcgactggcacgatcgacccaaccttcggggaggatacgttcgccatcgatcaccccgtcctcgaggacgaactggccgaagcggccatagtcgcgcagggtcgcgctcaagccgctgctgccgatctcttgcccggccggcgattccagttgccagaagccgtcgctctccatgcccatccgcgcccagatccgctcggacaggtagtcgctcaccggaatgcgggtcgccgcgtgcaacagctcgctctgcaggtgcgactcgccggtgctgtaggtgaagtgggtaccggccgggtactgccgcggcaggctcgccagcagccgcaggatgccaccgggacgttcggcgagctgggcgtcgaacatctgccggcggtcggacttcggatcgcgataggtctcgttccagcggaccccggaactcatctgcaggacctgctccaccgtcaccccctggtaggcggagccggccaggctcggcaggtacttgtccacaggctggtcgagagccagcaggccctgctgcacggcggcgcccaccagggtcgaggagatcgacttgaccaccgagaacgaggtccagcgcgtgcgttcgtcgttgcccaggccgtagcgctccagggcgaccttaccatccttgaggaccagcaccccgccaacgcggttgcgccgcatgaaatcgtcgacgccgtattcctcgccgccgatccggtagcgcggcgcgatggccacacccgccggcagcggacggaccttggtccccttgtggataacccgggtcggatagaccttgtccatgttccggtaggtgtccggctggtattccgggatcagttcatagagatcggcggcacggccgatccgcgggttttccacagccgcgtcggcgccggccgagccgcttgccgagacgaacagcgccagcagggccggccggaagactgatatacagctacgcatggacgttttccttatgaccggaagcagctccggcttcgtcgtttttatggatgtggactggcgtctcacggttatccacaggacgttcagtcgctcgggtcccgtatcggacacgcccagagttcgaccgccgggcgctcagggtccggcggaccgatccagcgcgccagcgcatcgcagcgcccctgacggcagatccggtagtcgccggcctccggtgtgcgccccagccgcaacggttgcagcggcggcaccccacggtggtaatgccaggcgccgtcacgcagcacggcgccctcgggaatctccatccccgccccgctgccccgcacccgggcctcttccagcagcaggccgcgctcactcaggcgatagtcttcttcccagagcaccttctcgaccgtgtgttgccaggccagggtgaacgactgcagcggcagcgtcgcccagacgctgccggccatgcccagacaaagcgcgatcacgccaccgcctcgcgcgcacgctggcgccagaggtgccagccgatcaccagcgcgccgaggacgaagcccagctcgtcgctgatcggcaaggccaggaccaggctggcccccgcggcgaacgccaccaggcgctcccaccaggccagcggcccctgcaggtagccgatggaagccatgccccacaggccgatggccagcaccgccttgcaggtgacatagagcgtcgccccccaaccgccttcctgcagcatcagcgccggggaatacaccgccatgaacggcaccacgaaacccgccagggcgatgcgcaccgcccagaagctgatcttcaatcccctttccttggcgatcggcgcggccgcgaaacaagccagcgccaccggaggggtgaggtcggcgaggatgccgaagtagaagacgaacatgtgcgagacgatcagcggcacccccagttccagcagcgccggcgcggcgatggagctggtgatgatgtagttggggatggtcgggatgcccattcccaggaccaggcaggtgaccatggtcaggaccagcgacagcagcaggttctcccgtcccaggtcgagcacgtagctggcgaaggtggtggcgatgccggtcagcgaaatcaccccgatgatgactcccaccagagtgcaggcgatgcccaccgggatcgcatgtcgcgcaccttcggcgagggcgcggacgcagatgcgcagggtttcccggccgccacggacgaaccagcaggccagggccagggccgcgatcacgacgaagatcaccccgatgccgaggcggaagaaccccgcgcagagcagccccagcgccacccagaaggcgatgcgcaggccgagcgaggacacccgcaggatgatcgccgaaccgaggatgacgatggcggtcagcgccaggccgatggttccggagaacagcggcgtgcgcccggagaacagcagcgcgatcagcaccagcaacggaatcagcaggaaccagcgctcgcggacggcaccccaggcgctgggacactgatcgcgcggcaggccctttagatcggcccggcgggcctcgaggtggaccatccagtacaccgagccgaaatacagcagggccgggatcagcgccgccttggcgatctccacgtaggggacgttgatggtctcggccatgatgaacgccaccgcccccatcaccggcggcatcagttggctgcccatgctcgcggtcgcctcgacgccgccggcgaacgccggcttgtagccgaaacgcttcatcagcgggatggtgaactgtccggtggtgaccacgttggccacgccggagccggtgatggtgcccatcagcgccgaggagaataccgagaccttggccggcccgccgacccggtgaccgaacaggcccatggcgaaatcggtgaacaggcggatcatgccggcctgctcgaggaaggcgccgaacaggatgaacagatagatgtaggtggccgatacgtaggtcggcgtgccgtagagaccttcggtaccgaacgacagctggttgacgatctggtcgaagccgtagccgcggtgggccaggtcgcccggcaggtgttcgccgaacaggccataggcaagaaacagcgcgcagatgatcggcaaggcgatgcccatcacccgtcgcgccgcctcgaagaccaggacgatcagcaccacgccgacgaccatgtcggcctgggtcagctctccggagcgctggatcaggtcgccctcgaaaacccactggtagaccgccgtgcccaggccggccatgcccagcaaccaggccagcggctgccaggggcgacctatgccgaaggcgggatagctgatgtacaccaccagcaacagcagtccgacgtgcattgcccgcaggacctgggtggaaatcaggggaaaggccgcggtgacgacctggaacacggaaaaggccagggccacggcgaacaacgcgcgcggccagttttccgcctcgaggtgcagcccgttctgatgatcgctcatgcatcgactccctacagccggaaacgcggggaacccggtccgccgcacggaccggggctacggagaaacgggcctcactcgggcagtacgcccttctccttgtagaagcgctcggcgccgggatgcagcggaatcggcaggttcttcgccgccttgtccagggcgatgtccttggcggcagcatgggcggtgaccaggcgcggcaggttgtcgaacatcagcttggtcatctggtaggccagctcgtcgctgaccccggagtggctgaccaggatattgtcgatcgccaccgtcggcacgtcctgctcctggccgtcgtaggtgccggcgggaatgctcgcggcgtggtaggccgggctgtcgatcttcgccaccacgtccgccgggatcgcgacgaaggtgatcggcatggtcgaggccaggtcgcggatggccgccatgcccaggccggaggattgcagcgtagcgtcgagctggcggttcttgatcagctccaccgactcggcgtagggcaggtactccaccttgcccatgtcctcgtagctcaggccggcggccttgaagatcgcccgggcgttcagctcggtaccgctcttgggcgcgcccaccgaaatgcgcttgcctttcaggtcggccagggtcttgatgcccgaggcttggctggccactacctggatatagttcggataggtattgccgatagcccgcagcttcttcaacggcgccttgaagccggcgtcggcgaccccgttccaggcgtcggcgaccgagtcgcccagcgccagcgccagttctccacgcccggcctgcaacaggttgaggttctcgaccgaagccttggtggcctgcaccgaggttttcgcgccctggatatcatgcccgtagatctgcgagaggccgacccctatggggtaatagaccccgctggtgccgccggtgaggatattgatgaaggtcggcgcggcaaagaccgaggtactgaaggtcaccgttgcggcaagcgtgaaaagaccgaagcgtctgctcagcgacatgggaagtctcctgttcttatcgttgttgtcgcgctgtcgcggaagcgtcccggcttccttcgaccgcgcaggacttcgtgcagactagaccgccccgccacgcaggacaatcagcaaggaccgattgcgcgaccggctccgcaagggagccggtcgccggcgttcaggcgtacaggtcgcgccgcgaccagggcagctcgtgggagccatcctcgtgggggcgaatggcgaggatctggtgcaggttgatccagccgcgcttgaagccgtaggcgcatccggccaggtacagccgccagatccgcagggtttcctcgggcaccaggcgagccgcctccttcagcctggcttccaggttggcgctccagaagtccagggtccgggcgtagtgcagacgcaggctttccacgtcgactacttccagcccggcttcgctcatccgcgccaccgccagcgacaggtgcggcagctcgccgtggggaaacacgtagcgatcgatgaagtcgccggcccccttgccaaccgggcggccgtcggtgtagcgcgaggtgatgccgtggttcatcaccaggccgccgggacgcaccgcctcgtacagttgctggaagtacagccccaggttggcgtgcccgacgtgctcgaacatgccgacgctgaccaccttgtcgaagcggccatcgcgcggcaggtcgcggtaatccagcagcttgagggtgactcggtcctccaggccttcggccttgactcgctcccggccgagcgccagctgctccttgctcaatgtgatgccggtgacctcgacgccgaactcgcgagcggccaggcgcgccagccctccccaaccgcaaccgacatcgagcagcttctcgcccggctgcaaacgcagcttgcggcacaggtgacggagcttggccagttgcgcggtggcgaggtcttccttgccggtctcgaaataagcgcaggaatagaccatttccggatccagccagagctggtagaagtcgttggacaggtcgtagtggtaatggatggcttcggcgtctgtgtccttgtcgtggctttcgcgaaccggcggcgcgccgccatcgggttcgccgagcgcttcgctgagggcatcgccgataccgatgacctggctgatcggtccttcgatgtcgagacgcttctcgacgtaggccttgcccagcgcatcgaggctgggatgggtgatctcggttagcagcgaggggtcgcgaatgaccatggttacctgtggatccggccccagatcgaacgcctgagcatcgccgatgcggatccgcaacggcagttgcagggacagcaactcagaggggagctgtgcaatcatgccaaacctcctggtcacaagacgggaacactatagtccagtacctgatagagttttgctatcgactacttagcctcctatctatcgatgcaaaacccctgagcactccgattcaggttagcagccagtctgcccatggatagttgacagttctgatatacaaactttcccttgctgcaataacggaatgacgcatacaccctgtcaaaggaagcggaagcgacataaggaatgccgatgaacgagaccgtatccctcgaaacacgcgaagtacgctttctctccgtgttcgacttcgacggtaccctgacataccgagacagcttcgtgcccttcctgcgtttcgccttcggcaaccgggtgttcgtccgccgcatgctgcgcatggcaggacccagcctggcctatctctgccggcgtatcgaccgcgacgacctgaaggcgcgcctgatcgccaccttcctcaccgatgtgcctgtacatgtgctggaagagcgggcgctggcctaccagaaccgcttctgggaaacactgatgcgtccccacgcattgaccgcggtggccgaccaggtcagcagcggcagcaccgtgaccatctgttccgcctccccttcgctgctactcaggccgttcgccgagaagctcggcgtgcacctgatcgccaccgagctggaagtggtagacggcgtactgaccggcaggatcgtcggccgcaactgccggcgcgacgagaaagtctgccgcctggagcggcactacggtccgctgacccaatactccctgcgcgcctggggcgactcgcgcggcgatacggaactgctggcggcggcgctggagcgcttctggaaaccgttccgctgaccggttcgcctcaaggcaccgtaacccacttgaaacgggactgctggtagcgctcccccttcggagccgaagaaagctggctggcctgaaaccatcgcctgcgaaaaagccgatgcccgcagaaaaatagcctttcgccatcaaccgatggccaaaaccagatcgacgtttggtcggaaccggcaagaggaatctggtctgccggaaacctcttcggtcatctcgaagcggcagtcagcgaaaaagaaaattctcggtctggcttggacttagggctattggtggctatttgccctatagggcttccggcaatatccggaaatctggatttcttctccgcccattaaaattaatagttgttcgatattctacagcgcttaccctcacaacgcccagaagttgcgaaaaccaatttacgcaaataattcgaacaattcattatttctggaattagccaatgaacctgatagcggaagatttcagcacacgaagccttctagcgggtgagcggtataaagcgaagatcgctttcgtttcaccacacaccaggcgtaacagttttgaggacgagccaaagtgctttctgggcgtcagcctggaaaatagaaatttcactcccaaccgcttccattccatggtcgagtgggcggctcggcgctttgagaaatgcagtattttgataggcgaccatattcaccggattaccttgcagtccacgcgggacatgcccgaggaagatgcccgccgcgaggccgtcagactgggcgacgcgttcatggaggaaagccggctcatcgtcgatgcctaccgacacgccacggacttccagtacataacctgttcggagatccaggccagtacagaatgcaaggacttctattcaagtttgcgtaactatttcctggagcactctggattccgagattcggtggaaaagtttggaagaaactaccaccggcataattgggagaagttgagtgaagaacagcagaggcatcgcctcgacttttcctcgcgatattttctcgaagagttttccgtattcgcctgcctagtaagaaaaggcttcaaagtcatggcctatcccggtgctttcagtacgttggcagaaatagcagcgggtgactttccaggaatgctcgatgaattgcagaaacttaccgtggtttccctgcaattgaaaaggagataggaatgagttcctctcccaagccggtggcctggcaattgaaccgaggttcgatctaccaggatgtctacgagaagagaatcgataaacgtcctgtagataccctggcaaaactgcaagaggcctatctggaggacgagcatctggtcttcccctccgaacaaacccgcgtggcggcgttgagagatggcgttttcctgttgcggataccggacgatttccaggtccgcgactgcgacctgttcgccagcaatttcttcaagggcccggccatcgccccctacggtgcatttcgcgaactcacagcggaaaccttcgacgatcccctgctgggttttcatgaacgaatcaaccagatcgagcaattcctgctggaacgacgcttctggaaaacccactacccagaggaaatcctccaggccggcgaacagctgaccgcttacagtcggcagttgctgcgtgccatcctgtcgctcaccgacatcgatccggaattctggagcctggctaccggcggtgcctcggacgcccagggttcctaccatttaaccttcaatcactatcgcccgcgcttcgcgggtgtcgggctggcttcccacaaggacgatgggttcctgacgctgttacgcaccaccgaaccggggctggaagtcaaccgcaatgatcgctgggaggcgctggagccctcatccgatcatttcgtggtcaactttggtctctccatggaagtgcttactcgcggctcctccacacccgtcagggccatcatgcacagggtcaggcatcagacccacgaccgctgcagcttcgctcatttcacctccagtcactgcactcccggcaccgaggcaggcatctacagctatgcaacgggagagggactcaggagagtctgcagttcgcgcgacatcatcgacgcgaacgacgaggagatctaccagggtacggtcatcagggagacggacaatccatgagcgggcttccccagttccatccctgcaaggcctatctggatgattccaggcacctggtcttcaaccaggcggatggctttgcgcgggcgctacgcgacggcttcttcgccctgcgtattccagaagaactggatctcgcaccaggtatccgcttcgcccaagagttctaccaacctgccgtggaagagccccatgcagacgcccgttaccggggtttcaggaaccttcccgacatctatttcgaccgggagaacttccagaccgaacatatccttgccgacgccagacaacgccaggcgtcgtttccagacgaagtgaaccgactgtgcgaacggatgcacgagatcgcccggctcatcctgcgtgagatcctcggcagcctcggcgtagcgccacggttgtggcccgacgtcaccggcgggaccagcgaagggaagggcgtcacctggttcgccgtcagccactaccgacccgagcgcaacatgcagggcgctccagcgcacaaggacaccggcttcgtcaccgtcttgtactgcgaccagccaggcctgcaggcgcgactcgaggaaggatgggtcgaggtcccccccatggaagggcatttcctgatcaatttcgggggcagcctggaacttctcaccgccaggttgccaatcccggccgccgcggttctccaccaggtccgacagagttcatcgacggtggagcggggcgatcgctactccttcgcggcattcctcaatccacctgcgaccggcgcgctctacagcctcaccgccgacggccagcgcgccgagccggtcattccggtagagaccttccttcgcgaattcaacgagcagacctggaaggacagctataccgatttcggcatcgccgaagggcctggggccgccgccccagccgacgaccacgcaaaccggtacctgcgcccatgaacagcaaagagaatagcgcgcccttccccggcctcatcgcccatcattccggctcttgtccggctaccggacacgccgaggctttccaccatgccacggtgtgccagggcctggacgcctccacctacttcgcccgttccggcatcgcggaactggcggagaacaacgaaggactctgtaccttctggctcggagacgacctggcgctctaccagacgaccaacgcgcccctcgtcgacgacgaggatctggcgccctcgatcaatgcgaacgccgagctcttcggttccttcctcggttccctgcccgcgcaggacgagcgacgcaaggccaagcgcgccgtggtcgaacgcgtgctcggcagcaaccggttcgttaccagtctggacccgcatgtacgcgaaatggcccaacactacctgcgagaggtggcaggtcgctcgctgcccttgcaggacttctgcctgcacatggtagcgcgcatcgacagcgggttgcccggcgtcctggattttcatcagaagcccctgacccactacctgcaaagcaccgaatacggagtgatcgccagggacttcttcgagatcgcctcggaggtcatcagcaagatgaatccggaatcgatcgagaacgccgacatgatcgtcgagatgacgcgcgacatgctggattcgaactacgaatcgattgtccgggctcctccaacgaacatgatcctcgcccagttcgactgcttctcccggcccttcacacgcgaaaccatacgaacgctggatgccgcatcactcaaggaactgggtacgatcatcgtcgcgacctatgacaccacggccctcagtctgctctggacgctcacctacctggaggacaacccagccgagaaagaacgtctgctgggtgtagtagacaacccggaacaagcgctggacgaggcctacctactggtgcttgaagcgatccgcctgggtggcagcaaccccactgcattgtggcgccggaccaaccggccgatacgcatccgccatcgcggcaccgaggttacgattcccgccaatacgatgctctggctcgatcgacggcgggccaatcgcgacgcgtcgctgttcccccacgccgagcggttcgatacggacaacatccggcagctcatccgcaaccagaccagccacggccaggccgtgtcgctgctggccaggaaccgctacgaaatcaactccttcaacatggtcaacacccatagaagcccgcgcaaatgcccaggccgcctgttctccgtcagggaacaggcgctgatcctgacggagctgtaccgcctctacaaggtctgcgtgacagaagccgactccacgctggcacctcacagttccatgccgcggccccgacgttcgggaaacatcatcctcactgccagggccgccgccctgtgaacctgtacgtcatggagaacgcttgatgagcaatatccttccatccgcccggatgctcgacggcatgctgcacttcaaggaagaagacggtttcagtcgcgcgcgcaagctaggtgccttccacctcgagcacccacggggctgggacttttcggccggcatcgccctggcccagagctattatctggaacccgaggtagacgccgacaacgccttccgggggttccatcgcaaggatctcggcaagtccctgctgggctattcccgcacaggtgccgaccaggacgaactgctgcagatcgaatgcggcctgtggcgggaatatcttcccgcccccgccgccgacctgctttgggcaatgaacgacctgaaccgcagtgttctctcgcaactgttcgcgctggtcggcatcgaggaaagacatttcgacctgatagccggcggcatgtcttccaaccaggcgctgcagtactgcatcttcaatcatttccgcgctgacagcgcccacccggtgggtctcaccgcccacaaggacagcggttttaccaccctgctctacaccacggagcctgggctggagtcgctggaaaatggctcctggattcctttcgatcccatgcccggccatttcaccctggtacttggacactccttcgaactcctaaccgagaagtccgccacccctgtccaggccagctatcaccgcgtccgcagaatggaaccgcaagagcgaaaagcggacaggttcaccttcggttcctacatcggtccgcgctgggaccaggacctgtaccagatcagcggcgagaccgttaagccggtgcaatccttcctcgagtttcagaaacgcaaagccgcggaaatgggttacgaattccatcccaaggtggagacggctcatcgctgagcccatacatccttcgcaggaggcgccagtgaacacgaaaccgaaaaccgccagctctccgacgctacgcgctccggtcaaccttccggcaatgccactggagagccaggtccaccaatacccacccatcgagatggcgcgatcgcgcctgctggaaagcagactcgtcttcgatcatccagacggcttcgaacaggcgcgcaggcacggcttcttcctgctggaagttccagctcggatggacttctgccctggcgacctattcgtccgcaattgcttccttccccgagcagagggcgccttgtccacctatacggggttcaaggaatgccagataccaggggcctaccaaggctatttcgacagggagcacgatcagtgggagaacgtctacatcgaacgaggcaactggtctcttatacctgaggccgtggctgcactgggcgtacaaatggcggagctgggtattggcgtcctgcgcgcggtgctcgcggagctagacatcccccgcgcggaatgggcacgcctgaccagcggcctgtccgaaggacagggccaccagatgttcggcttcaatcatttccgcgccagcaagccgatccgtggttccaagttccatcgagactcgggctgggtcaccgtcctgcgctccaccgaacccggactgatcgcctatatcgacggccagctccgctcgatcaacccactgcctggccatctcatcatcaacttcggcagttccatggaagtgctttccgaacacctgtcgagaaaggtccacgctaatgtccacggggtagcccgcaccgagcgcgcgagcccggacgaacgctactcctatgtcgttttcctggatagcgatctgggcggcgacatctaccgatacggtccggccggagcccagaaggtacagacggtcctcgaattcgccgaacaggaggtcagccggacctacaacgacgacatcctcctctgaccccatgccagaggagttcacccaaccggtcccggggatgacaaacgatgaacccaaacgccacctatgctctggcttcggccgaactgatcgacggaaagctacgcttcgacagcagcgatggcttcgcccgcgccatcgccgacgggttcttcttcgtcaagtcaccgagcctggacctggcagccggcgataccttcgcccgcaacttctacctgcctcgccaggagggcctcggcgcgccctaccagggtttctcgcagtggaccgaagatcggctggcgcgccgggaaggatatttctcccgcgacgtcgaccaggtcgagcagttcttcctcgagagccgattctggcagacagtgttcccaggccctttgctgcggcaggccgaacggatgcggagtttcagtctcgaggtgctgcgggccgtactcgcggaactggacctgccggtagagctgtgggacgaggccacgggacgctgcctctccatgcaaggcacctatcacctgacctttaaccatttccgcagccacgtccgggcccgcgggctgaatgtgcacaaggactcgggttgggtgaccatcctgcgctcgctggagcctggacttgaggttcttcgcgagggagactggctgccggtctcgccccgtcccggcgaattcatcgtcaacttcggctgcgcgatggagatactgacccgtcactcggccactcctgtcgccgccgtcgctcaccgagtgcaggaacaattgccaggccaagccgatcgcttctcctatgccctgttcgtggatagcagcctggacccacggacatgccctggcctgtttcgctatcttccaggccacggcctggtgctggaagcagatttcgaaatgttcctcaacgaaattctgcacaatacttaccaagagaatacccagggtctatattgaccctcctccccgcagtacctgcattccccggagagccgccgcaaagtcggctttccttccccagtcctcggcagatcaactcatccctgaccctggcgccggctccacgagccggcgcccccttggcgttcgtccgctcattcagccaaagagaacatcatgaaccagaaaatttccccgccttcacagaagctcgacggcctgttcctgctggccctgtcgatggccgtattcttcgtcggcgtgaccgagttcatgctgtcctccatgctcgggccgctggcgcaggcgttccacaccactaccagcggcgccgcctggctgatctccagctacgcgttctcctatgcgatcgccgcgccgttgctgggctacttctccgaccgcatgcaacgcaggaagctgctgctgctcgccctggtcctcttcgcggtcgatactctggccatcgtcatcgccccgaccctggaaattgccgtcgtcctgcgggtgatcgggggcatcgcctcggcaatcatcatcccgaccaccttcgccctggtcgcggaggtggtcgccccgcaaagacaggccggtgccatgggccaggtgatgctcggcatgaccctcggcattgccgccggcccggcactggccggcctcctctcggacttcttcggctgggcggcgcccttcctgatggtctcgtgcggttgcgtgctggtcttcctgatggcacgccagcgccttcccgtgcaagccgtggcaccgcgcgccgagggccatgcgctgggctggtgcaggcaatggagcatcctcaggccactgatcgccaagggtgcctggaacggcaccggggtcgccggcctgcttctctcgggagaggtgctgcgccagcgctacggcttcagcaccgcgcagataggcgtcagcatcgccgccttcggcgtgggcctggccgtgggcaacctcgccgcgggttacctgcgacgttatctgaagcgcgacgaagacatgctcctgctggtgctggcgctcctggtgctatcgatgtcgaccttcatgctcctgccgctaccgttacccgtggcgctctgctgcctgggcgcctggggcgccgcactgggcctgggcgcgccggcgggcacggtggtactcgcctcgcgctccgggccggacaagggcatggtgctgtcgttcgccgagacgttcaacaacatcgccattctcgccagcgtgcccctggctgtgcgactgctggagctgaaggggccgcccgccaccctgtgggtattgggcatcggcctggggatcggcgcctggctcaccgtgctggactggttcgccagccgcagaagcgacgaggcgctgccgttgcgcgattgacggcgagcgccggggccgcatgcctgccccggcttctcgggcacgcggccggcgttactcgacggtgaccgacttggccaggttgcgcggctggtcgacgtcggtgcccttgagcacggcgacatggtacgagagcaattgcaacgggatggtgtagaggatcggcgagagcacgtcgccgatgtgcggcatgcccaccacatgggtgccctcgccagcctcgatgcccgcgccttcgtcggcgaacaccaccagttcgccgccgcgggcgcggacttcctgcaggttcgacttgagcttctccaccagctcgttgttcggcgccacggtaaccaccggcatgtcgctgtccaccagcgccagcgggccatgcttgagttcgccggccgggtaggcctcggcatggatataggaaatttccttgagcttcagcgcgccttccagggccaccgggaactgcgcgccacggccgaggaacagggtgtggtgcttctcggcgaacagctcggaaaccttctccaccgtccggttcatcgccagcgcctcgcccagccgggtcggcaggcgacgcagttcgtccaccagctcggcttcgacgccatcggccaggcgcttctgcacctggccgatgcccagggtcagcagcagcagggcgaccaactgggtggtgaaggccttggtcgaggccacgccgatttccgggccggcctgggtcagcagggtcaggtcggattcgcgcaccagcgaactggtggcaacgttgcagatcgccacgctggagaggaagcccagctccttggcgttgcgcagggcagccagggtgtcggcggtctcaccggactgggagatggtgacgaacaggcaatccggctgcaccgcgaccttgcggtagcggaactcgctggcgacctccacctggcagggaatcccggtcaggctttccagccagtaacgggcgaccatgccggcgtggtaactggtgccgcaggcgacgatctgcacgttgcggaccttggcgaacagctccgccgcctgcggaccgaagctttcaaccattacctggttctgcccgaggcggccttccagggtgcgctgcacgacgctgggctgctcgtggatttccttgagcatgaagtgccggtactcgcccttgtcggcggcttcggcgccttcgtggtactgcacggtctcgcgctgcacgtcgttgccctggacatcccacaggcgcacgctgtcgcgacggatctcggcgatatcgccttcttccaggtagatgaagcggtcggtcacctggcgcagcgccagttggtcggaagcgaggaagttctcgccaagcccgaggccgattaccagcgggctgccgctgcgagcggcgacgatgcggtccggctgcgccgcgctgatcactgccaggccataggccccgtgcaattccttgaccgcgtccttcagcgccagggtcaggtcgccgatggactgcagcttgtggtgcagcaggtggacgatgacctcggtgtcggtctgcgaggtgaacacgtagcccaggcccttgagccgctcacggagaggttcgtggttctcgatgatgccgttgtgcaccaccgccagttcgtcgctggagaaatgcgggtgggcgttgccttcggttggcgcgccgtgggtcgcccagcgggtatgggcgatgcccaggcggccgagcagcggcgtgccggccaggccttcctccaggctggcgaccttgccgacccggcggcagcgctgcagcctgccttcgttatcgaagaccgccacgccggcgctgtcgtagccgcgatactcgaggcgcttgaggccttcgatgaggatgggggtgatgttgcgctcggcgatcgcgcctacgattccacacatggggtctttctcctttcaggcctcgaccggggcgcagatcagcgtgacgccccgggcggttatctgttcgcgcgcggaagactccaggcgctcgtcggtaatcagggtatggatgctgctccagggcaattcctggttgggaatgcgccgaccgaccttgtcggcctcggccatgacgatcacctcgcgggcgacctcggccatcacccggctcaggcccagcaattcgttgaacgtggtcgtcccgcgttcgagatcgatgccgtcggcaccgatgaatagttggtcgaagtcataggaacgcagcacctgctcggcaacctgcccctggaacgactcggaatgcggatcccaggtccccccggtcatcagcagcaccggctcgtgctccagttcgcgcagggcgttgaccacgttcagcgagttggtcatcaccaccaggcccggcttgtgcccgagttcggggatcatcgccgcggtggtgctgccactgtcgatgatgatccgcgcatgctcgcggatgcgcgccgcggcggcgcgaccgatagcctgcttgtagggcgagacgggctgcgcagcttcaccgatcagttcctgcggcatcggcaccgcaccgccgtagcgacgcaacagcaggccgtggctttccatggcggcgaggtccttgcggatggtcacttccgaggtggaaaagcgcttggcgagtgcgtccacgctgacctcgccctgctcggaaagcagcgcgaggatggcatggcgacgttgcggcgtattacgtttcgagatcacttaagtttcgtttcgaaagaaaagtgtgcgaatcaaaacttatccggcgcttctcgtcaatgacttttcatcggctcggcagcaccgtatcgggatcgagatagaacatcttcttccaaccctgggtgctgtcgtcggccagccagggatagggcagcaaggtgatgatcgcgtagtgcaggtgggccggcttgccgcgcgcgttgccggtggtgccgaccgtacccaggcgggaaccggcaaggaccggctggcccggataggcgtcgaggctatcgagatgggcgtagtaatgcaggcgccacttgggcgccagcaccaggacgaccttgccgccgagggcgatctccccgcgatagagcaccaggccgtagctggcggagcgtacgggggtgccgctgcgggcgaagatgtcgatgcccttgtgcactccggagcgcccccagggctcgaaccagaaggttcgcggattccagtcgcgggcactggcgccttcgacgggtatccgcggccattcgggcagcaccgcccaggctatgagcagccccagcacgatccgtttcgcaggcttcggcatccgtgccgctccgttacttcttgattttttccgggcgcttccagttttccaggttcttctgccgggcgcggccgaaggccaggttcttcgccggaacctcatgggtgatggtggagccggccgcggtcgtcgcgccatcgccgatcttcagcggcgccaccagcgagttgttcgagccgatgaacacatcgtcgcccagctcggtgcggaacttgttcgcgccatcgtagttgcaggtgatggtgccggcgccgatgttgcagttggcgcccaactcggcatcgcccaggtagctcaggtggccggccttgctgccctcgcccaggcgggcattcttcagttcgacgaagttgccgacatgggcccgagcgccgagcacgctgcccggacgcaggcgggcaaacggaccggcatcgctaccctcgcccagctccgcgccttccaggtggctgttggccttgattaccgcgccacgccgcaggacgctgtcgcgaatcacgcagttcggtccgatgcgcacgtcgtcctcgatcaccacgcggccttccagcaccacattgacgtcgatcagcacgtcgcggccgaccgagatttcgccacggacatccaggcgctgcggatcgagcagggtcacgccctggcgcatcagctcctctgcgcgcatgcgctggtagtgacgctccagctgggcctgttgcatgcggtcattgacgccctgcacttccatcgcgtccagcggttgggcgctggccaccaccaggccgtcgccgaccgccatggcgatcacgtcggtcaggtagtactcgccctgggcgttgtcgttggacaggcggccgagccagtcggcaaggcgcttgcccggcaccgcgaggatgccggtgttgatctcgccgatctggcgctgcgccggggtcgcgtccttgtgctcgacgatggcctgcaccgcgccctggtcgtcacggacgatgcggccgtagccggtggggtcgagcatgtcgacggtgagcaacgacaactggtccggggtgacttgcgccagcaggcgctgcaaggtgtccagctggatcagcggcacgtcgccgtagaggatcagcacctggtctgcactgaggaacggcagggcctgggccaccgcatggcccgtaccgagctgttcggcctggagcacgaaattcaggtcgtcggcggccatccgctcacgcaccagatccgcgccgtggccgatcaccacgtggatccgttccggctgcaactggcgcgcgcagtcgatgacgtggccgagcatcggcttgccggcaatgggatggaggaccttgggcagggccgaacgcatgcgggtgccctggccggcggcgagaatcacgatttcaagggacatggactggactaccgttcctggtggtcacaggcaaaacctgtgagtgaagatgcaaaacgaaaaaagggtagcccacaggctacccttttccctgacaccgctagaagtaccggctggaaatcagccgccgaacttcttgcgcagttgctggacggtgcgcagctgggctgcggcttcggccagacgcgcggcagcggcgctgtagtcgaactcggcgcccttgccctgcagcgccttttcggcagccttcagggcttcctgggcggccgcttcgtcgaggtcgccggcacgaaccacggtgtcggcgaggaccttgaccatgttcggctggacttcgaggaaaccgccggagatgtagtacacctcctgctcgccgccctgcttgaccaggcggatggggcccggtttcaggtcggtgatcagcggcgcgtggcccggggcgatacccaggtcacccagagcgccgtgcgcgataaccatctcgaccaggccggagaagatctccgcctcggcgctgacgatgtcgcaatggactgttatggccatacgcttgcctcacatgagcgcccgtcgccgggcgcacaggattacagttttttggctttctcgaccgcttcttcgataccgccgaccatgtagaacgcctgctccggcaggtgatcgtagtcgccgttgagaatgcccttgaagccagcgatggtgtccttcagggaaacgtacttgcccggcgaaccggtgaagacttccgctacgaagaacggctgggacaggaagcgctggatcttacgagcgcgcgccaccagcagcttgtcggcttcggacagttcgtccatgcccaggatcgcgatgatgtccttcagctccttgtagcgctgcagaacatactggacgccgcgagcggtgtcgtagtgatcctggccgatcaccagcggatcgagctggcgagaggtggagtccagcgggtcgaccgcggggtagatacccagcgaggcgatgtcacgggacagtacgacggtcgcgtccaggtgggcgaaggtggtcgccggggacgggtcggtgaggtcgtccgcgggaacgtatacggcctggatcgaggtgatcgagcctttcttggtggaggtgatgcgctcctgcagaacgcccatctcttcggccagggtcggctgatagcccaccgcggacggcatacggcccagcagtgcggatacttcggtaccggcgagggtgtaacggtagatgttgtcgatgaacaacagaacgtcacggccttcgtcacggaacttctcggccatggtcaggccggtcagtgcgacgcgcagacggttgcccggcggctcgttcatctggccgtataccagggctaccttgtccagtacgttggagtccttcatctcgtggtagaagtcgttaccctcacgagtacgctcgcccacacccgcgaacacggaataaccgctgtgctcgatggcgatgttacggatcagttccatcatgttgacggtcttgcccacgccggcgccgccgaacaggcctaccttgccgcccttggcgaacgggcagaccaggtcgatcaccttgatgccggtttccagcagctcgttgccgccagcctggtcggcataggacggagcttcgcggtggatgccccagcgctcttcttcgccgatgggaccggcttcgtcgatcgggttgcccagtacgtccatgatccggcccagggtcgctttaccgaccggcacggagatggcagcaccagtgctgtccacgttcaggccacgcttgaggccttcggtggaacccatcgcaatggaacgaaccacgccgtcgcccagctgctgctggacttccagggtggtttcaacgccctgaaccttcagggcttcatagatgctcggcacggcatcgcgcgggaattccacgtcgatcacggcgccgatgatttgaacgatacgtccgctactcatgtctggttcctctgaattttgaacctgttcttacaccgcggcagcgccgccgacgatttccgagatttcctgggtgatcgccgcctgacgcgccttgttgtagatcagctgcaaatcgctgatcagctcgccggcgttgtcggtagcgttcttcattgcaatcatccgggccgcctgctcacaggcgttgttctcaaccacggcctggtacacctgggattccacgtaacgcaccagcagcccgtcgaggagcgacttggcgtcgggttcgtagagatagtcccagtggtgcttcagctcctgatcgtcatcggccaccagcggaatcagctgttccacggtcggcttctgggtcatggtgttgacgaacttgttggagaccacgaacaggcgatcgatacggccttcgaggtatgcgtcgagcatcaccttgacactgccgatcaggtcgttgatcgaaggctcttcgccgaggtggctgatagctgccacgacgttgccgccgaaactgcggaagaacgaagcgcccttgctaccgatcacgcaaaggtcgatttccgccccttgctcgcggtagccgctcatgtccttgacgagggacttgaacaggttgatgttcagaccgccgcacagaccacggtcactgctcaccacgatgtagccgacgcgcttgacttcacgctcgaccatgaacgggtgacggtattccgggttggcgttggccagatggccgatcacctggcgaatacgctccgcgtagggacggccggccgccatgcgcatttgtgccttgcgcatcttgctcaccgccactttttccatggcattggtgatcttttgcgtgcttttgatgctcgcaatcttgctgcgaatctcttttgcgcctgccatttgacacctatcgggttagcaggcgggagcctcgcggctcccgctgcggcttaccaggtttgggtggccttgaacttctcgatgccggccttgatgcccgcgtcgatttcgtcgttgaagtcacctttctcgttgatcttcgccagcagagcggcatgctcgcgctggaagtaggagatcaacgcctgctcgaagctaccgaccttggcgatttcgacgtcctgcaggaagccacgctcggcggcatacagggacagcgacatctcggcgatcgacatcggcgcgtactgcttctgcttcatcagctcggtaacgcgctgaccatgctccagctgcttgcgggtcgcttcgtccaggtccgaggcgaactgggcgaaggcggccagttcacggtactgggccagagcggtacggatgccgccggacagcttcttgatgatcttggtctgggccgcgccacctacgcgggataccgagataccggcgttgacggccggacggatacccgagttgaacatggcggattccaggaagatctggccgtcggtgatcgagatcacgttggtcggaacgaacgcggaaacgtcgccggcctgggtctcgatgatcggcagcgcggtcagcgagccggtcttgccggtcacggcgccgttggtgaacttctcgacatactcttcggaaacgcgggaagcgcgctccagcagacggctgtggagatagaacacgtcgcccgggtaggcttcgcggcccggcggacggcgcagcagcagggagatctggcgataagccacggcctgcttggacaggtcgtcgtagacgatcagggcgtcttcaccgcgatcgcggaagtattcgcccatggtgcaaccggagtacggcgccaggtattgcagggcggcggactcggaagcgctggcggcgaccacgatggtgttggccagggcaccgttctcttccagcttgcgtacgacgttggcgatagtggactgcttctggccgatggccacgtagacgcacttaataccgctgtctttctggttgatgatggcgtcgaccgcgagggcggtcttgccgatctggcggtcgccgatgatcagctcgcgctggccacggcctaccgggatcatggcgtcgaccgacttgtagccggtctgtaccggctggtctaccgacttacgccagatcacgcccggagcgaccttctcgaccgcgtcggtggccttggcgtcgatcggacccttgccgtcgatcggattgcccagtgcgtcgactacgcgacccagcagttccggaccgaccggaacctccaggatgcgcccggtgcacttggcgttcatgccttcggcgaggccctggtattcacccaggaccacggcacccacggaatcctgctccaggttcagcgccataccgtagacgccgcccgggaactcgatcatctcgccgtacatgacgtcggccagaccgtagatgcgcacgataccgtcggacacgctgacgatggtgccttcgtttcgtgcttgggaggcgacgtcgagtttctcgatgcgccccttgatgatttcactaatttcggaaggattgagttgctgcatgccgctgccccttcaaactcaagatttcaacgcttcggccagtttcgcgagcttgccgcgcaccgagccatcgattaccaagtcaccggcgcgaatgatcacgccgccgatcaggctcgcgtcttccgacgcatgtagccgcacttcgcgactgagccgggcgctgagagccttggcgagtttgtcctgctgttctttgctcaaggtgaaggcactggtgacttctacctcgaccgacttttcctgctcggccttcaactgctcgtacatctcagcgatggtcggcagcagttcgagccgcttgttctcagccacagtccggacgaagttctgggctggtgcattcagcttgtcgccgcacacatcgatcaggctctgggccttggccgaagaggtcagctgaggctctttgagcagctggcgcacggtgtcgtcctgcgacactgcggccagcacacccagcgcagccgaccaatcggccagttgctgatgagcctgggcgtactcgaaagccgcctttgcgtagggacgagccaacgtggtcagttctgccatagcgccctcgcttagatctcggctgccagtttggaaaccagctgctcgtgcgcgtttgcgtcgatcgaagcacccaggatcttctctgcgccggtgacggccagggcacccacttgggcacgcagggcgtccttgacgctgttcagttcctgttcgatttccgcttgggcctgggccttcaggcgttcgccttcggtacgggcctggtcgcgggcttcatcgacgatctggttagcgcgtttcttcgcctgttcgacgatttcggctgcctgagccttggcttcgcgcagttgctggcccgctttctcatgagccagctccagatcacgagccgcgcggttggcagcgtccaggccgtcagcgatcttcttctgacgctcttgcagagccgcgatgaccggaggccacacgaacttcatgcagaacagcacaaagatgaagaacgcaacggactggccaatcagggttgcattaatgttcacgccaacacctcgctcgttcgttgtccgtcaaacactcaaatcgaatgattcgagtgattagccggcgatttgaccaacgaagggattcgcgaaggtgaagaacagggcgatacccacaccgatcatggtcacggcgtccagcaggccggcgacgatgaacattttcacctgcagcatcggaaccatttcaggctgacgagctgcgccttccaggaacttgccacccagcagaccgaaaccgatggcggtacccagggcacccaggccaatcagcagagcaacggcgatagcagtcagtccaactacagtttccatttttcctcccgactttttgtcgtgttggttaaaggttgaagcgaatcgattaatggttgtcttcgtgcgccatcgacaggtagacgatggtcagcatcatgaagatgaaggcctgcagggtgatgatcaggatgtggaacacagcccacgcccagttcagggctacgcccagggcactcagcaggaacattccgctaccgaacatgacggcgatcagaatgaagatcagttcgccggcatacatgttgccgaacagacgcagcgccagcgaaaccggcttggcgatcagggtcacgaactcgagcaggaagttcaccggaatcagcaggatctgaacgacgatgttcttgctgctgaaggggtgcagggtcagttcaccgaggaagccgccgatgcccttgaccttgatgctgtaaaagacgatcagggcgaacaccgagatcgacaggccgagggtggcgttcgggtcggtggtggccaccgcgcggaagaacaggtgctcgtcgccggtgatcttcgcggccagcatcggcaggtagtccaccggtaccaggtcgatcaggttgagcaggaagatccagacgaacacggtcagggccaggggcgcgatcaacgggttacgcccgtggaaggtgtccttgacgctggtgtcgacgaactcgaccatcacctcgacgaagttctgcagtccacccggctggccgctggtggccttcttggccgccaggcggaagatgaacaggaacaccacgccgagcagtaccgaccagcccagggtgtctacgtggaatgcccagaagcccatttccttggcttgctcggcggtgtgggcgaacccccaatcaccattaggcagacgcccgaaggtcaggttctgcaagtggtgctggatgtaacccgaagcggtttctgctgccatgtttgcctcaatcgctctaaggtcttgtaaatgtttttcccatcagcaggggtgcgcaccagctgaccatcagggtcagcagatagacaccgaacagagccggcgccatcagtggcttcacgcctgcgaacgtcagtgcgaagagcaccgccgtcagaatcagtttcccggcttcgcccgcatagaaagagcgaacgatttcccgggcagcccgcgctccgctgaaacggaacgccttgtaggcgaaataacaattcggcaaccaggcgatcatccctcccagcagtccggaatatccggctaccggtccccaagaaatccacagggagatcgcagcaacaagcactactaccagttggacgagcagcaatctgaatgccggcaggcgacttggcatgcgggactccatcgcgctctcagtcttctggtgtcggcactgccaaatcaacgacttggcataaaaagtgcccacaaaatagcgcgcagagtatagggggggagtcccccctgttcaactggctggtagtgatttccgactacccgctacaacccaaagtgtgtcaacggatgtgggcgagaacgccctgcagttcatccagggagctgtagcggatgaccaactgtcccttgcccttctgaccatgccggatctgcaccgaagcgcccaggcgctcggccaggcgctgttccaggcgggcgatgtccgggtcgctcttgaccggtcccgcaggcttgcccggggcatgcgtccactgccgaaccagggcttcggtctgacgtacggtcagcccatgtgcgacaacatgtcgcgccccttccacctgccgttctgccggcagaccgaggagcgcacgggcatggcccatctccaggtcgccatgggaaagcagggtcttgatctcttccggcaggccgatcaggcgcagcaggttggtaatggtcgcgcgcgacttgccgaccgcttccgcgacctgctgctgggtcagctggaactcctgctgcaagcgctgcagggcagcggcttcctcgatcgggttgaggtcctcgcgctggatgttctcgatcagcgccatggcgatggccgcttcgtccggcacgtcgcgcaccagcgccgggatcttttccagtccggcctgctggctggcccgccagcgccgctcgccggcaatgatctcgtagcggccattggcgatcggccgcaccacgatgggctgcatcacgccctgggccttgatcgactgcgccagttcctccagcgcctgagggtccatgtcgcgacgcggctggtacttgccgcgctgcatcaggtcgagggggatctgctgcaactcgcggcggtcggcctgtacggcttcctcctgcagtttggcgggactcgagccgcccagcagggcatcgagcccgcgtcccagtccacgtttcttggctgccatgcgggttccttatgcggttgcggcgcggcctttggcgcgctggcggcggaccagctcgccggccagcgccaggtaggcgatggcgccgcgggattgcttgtcgtaaaccagcgccggcatgccgaagctgggggcttcggcgaggcgcacgttacgcgggatgacggtgctgtagagggtgtcgccgaaatgctcctgcaactgcgcggagacatcgttggtcaggctgatgcgcggatcgtacatggtccgcaacagaccctcgatcttcagcgtcgggttgagcaactggccgatgcgctggatgctgttcatcaggtcggtcagcccctccagcgcgtagtactcgcactgcatggggatgatcacgccgtcggcggcggtcagcgcgttgacggtgagcatcgacagcgacggcgggcagtcgatgaggatgtagtcgtagttctcgcggatcggcgccagcgcgttgcgcaggcgattttccttcatgtccatttccagcagcaccacttccgcggcggtcaggtcgcggttggccggcagcaactggtagccgccgtgttcggagaactgcatggcctcggcgaggttgcactcgccggtgagcacgtcgtagatggagtgctccaggttgtgcttgtcgatgccgctgccggtggtggcgttgccctggggatccaggtccagcaggaggacgcggcgcttggtcgccacgagggaggccgcgaggttgatacaggtcgtggtcttgccgacaccgcctttctggttggcgatcgcgaataccttagccatggttatccctgttccccctcatgctgtgcgccgcagtatcagcagatgccgctgaccttggcaaccgggtaccgccagcgcgtgctcggcttcgacccggaaatcctccgggagtgccgccagctcttcgttcggatgcacgcccttcatcgccagccagcgggtttcctggccaccgaggtggcgggtccagttggcgaagtcctccaggctgctgaaagcgcgggaaacgatgccatcgaaggggctctcgggacggaaggcttccacccggctgtgcacgacttcgaggttggccagcttcagctcgagcttcacctgggtcaggaagcgggtcttcttgccgttgctgtcgagcagggtcaggcgcttttccgggaacaggatggccagcggcacgccgggcatgccgccgccgctgccgacatccagccagttatccccagcctcggcataaggcacgatgctcaggctgtcgagcaggtggcgcgaaaccatctcgtccgggtcgcgtacggcggtcaggttgtaggccttgttccatttgatcagcagggccaggtaggccagcagctggcgttgcttgtcggcgtcgagggcgacgcctagctcgtcagcaccgcgcgcgagttcgtcggcgtggtgttgggttaccgcagacatcaagcgctctgctccagttggcggccagaggcacgcttcttcaggtggatcaacaacagcgaaatcgcagccggcgtgacgccggggatccgcgaagcctgtccgagggtttccggacgggcctggttcagcttgttctggatttccttcgacaggccggaaatccccaggtaatcgatatccacagggaggcgggtatcttcgctggcgcgcagccgggcgatttcctcctgctggcggtcgatgtagccggcgtacttggtgcgaatctccacctgctcggccacctgggggttatccacagcatcgccggtgatctccaccaggccggcgtaatcgatctcggggcggctcagcaggttgagcaggttgtattcatgggtcagcggcgtaccgaagcgctcggcgatggcgtcgccctgcggggtattcggccgcacccaggtgctcttcagccgctgttcctcgcgttcgataccttcgcgcttggcttcgaaggcagcccagcgccgatcgtcgacaaggcccagctcgcgtcccttctcggtgagacgcaggtcggcgttgtcctcgcggaggatcaggcggtattccgcccgcgaggtgaacatgcggtacggctcctgggtgccgagcgtgatcaggtcgtccaccagcacgccgatgtaggcctcgtcgcggcgcgggcaccagctgtccttgccttgcgaacgcaacgcagcattggcgccggccagcaggccctgggcgccagcttcctcgtagccggtggtgccgttgatctggccggcgaagaacaggccgccgatgaccttggtctccaggctgtacctgagatcgcggggatcgaagaagtcgtactcgatcgcatagcccggccgcacgatgtgggcgttttccatgccacggatggaacgcacgatctgcagttgcacgtcgaacggcagggacgtggaaatgccgttgggatacagctcgtgggtcgtcaggccttccggctcgaggaagacctggtggctttccttgtcggcgaagcgatggatcttgtcttcgatcgaagggcagtagcgcgggccgatgccttcgatcacaccggaatacatcggcgaacgatcgagattggcggcgatgatctcgtgggtccgggcgttggtatgggtgatccagcaactgacctgctcgggatgctgttccttcgaaccgaggaaggacatcaccgggatcggcgtgtcgcccggctgctcggtcatcaccgagaagtccacgctgcgcccgtcgatccgcggcggcgtaccggtcttcagccggccgacccgcagcggcagttcgcgcagacgacgcgccagtgcgatggacggcgggtcgccggcgcgtccgcctgagtagttctccaggccgatgtggataagtccgccgaggaaggtgccggtagtcaggaccacgttgtcggcatggaagcgcagtcccatctgggtcactacgccgcggacctgatcctgctcgacgatcaggtcgtcgcaggcctgctggaatatccacaggttcggctggttttccagtgtatggcggatagcggccttatagagcacgcgatcggcttgtgcacgagtggcgcgcactgccggccccttgcggctgttaaggatgcggaactggataccgcccttgtcggtggcttcggccatggcgccgccaagggcgtcgatttccttgaccagatggctcttgccgatgccgccgatggcggggttgcagctcatctgccccagggtttccacattgtgggtcaacagcagggttttcacacccatgcgcgcagccgcgagtgcggcttcggtgcctgcatggccaccgccgatcacgattacgtcaaaacgggtagggaaatccaccacgcacctcggcctgttcagaagcaggaattcaggaaagccggacagtataaggatttagcgaacctgaatgaagactcctggacaaaaaatagccaatccagatcgagggagcaaaacggctcggcgggcttacaaaaaataaaaggaaaggaatgtttatatctttttagaacttgtgtttattacttagcagcggcttttctgttgataagtacgtcgagcccagtaaagacatagcctgtagcgaatgataaggctgtcccaaaccctatctgggccctgttgataagcgttttttagctgtggatggaatggctcgttatcaacatgtggagttatgcacagaacttcggcgggtttatctaccctcctgtccctggggttttccacaggtttcaggcgagcgtatccgggccgcggcaggaccgcagccaggtaggaagaaggagatggaaaggcgtgggaaaggctcagtcgttgccgctttccagcgtatcgatggatgacgacaggcgctcgaagcggcgcttggcggagacctggaaatcccgctcggagccctcgttagcgggtttgcgcagcagtagccgagcactgagcccgctagtgcggtcgtaactgccgaaccagtcgatcatctgtccgacctggcattcgccgccgagccacaccgccaggttggctacgatctccatgctgtagtgtccgagtgctcgccatgggacgccttgggagccgaaggcgagggccccgcctggccggtatcgacggagtccagggtctgcaacagctcttttcgcagaatctcttccaggcttgtggataaaccgcttaccgggttgacttgcgtgcacggaacgtcccggcgcgtggcgatagcgccaggcgagacaacgggatagatacgccgttcgagaggggcgagcagatagagattgaccacagcgcagcgccttcgcggacgccggatcggagcgcggtgcctgtgcataaacctctcccaggtggatatccatcccatgcagaccgacatcggcgcagatggttttctcggggacgaagcggcgcgccggcaatccatgcctgcgtggttgagtgccggcggcaaggggcacagtgaaaggaaagtacgcagaaccggagcgaaccttgccctggttatccacaactcggcgtgggccgagccccattacttgccgatgcagaaactcgagaagatgcgacccagcaggtcgtcgggggtgaatgcgccggtgatttcgcccaggtgctgctgggcctggcgcagatcctcggccagcagttcgccggcgccattgtggataagttggctgtggccatgctccagcgcctgccctgccaggcgtagcgcttccaagtggcgccggcgggcgctgaaaccgctttccgcggtctgttcgaagcccatgcaggccttcaggtgttcgcgcagcagctccaggccggcgccggtgcgcgccgagagggtgatggtgacgtggccgtccgcgctttcctcgaggccaatggactctgtggacaaatccgccttgttgcggatcagggtgaccttgcccggttccggtcgctggtcgagaaactccggccatagggaaaacgggtctgctgcttccggggcggtggcgtccaccaccagcagcacgcgatcggcttcgccgatggctttcagcgcacgttccacgccgatcttttccacatggtcctcggtatcccgcaggcctgcggtgtccaccacatgcaggggcatgccatcgatgtggatatgttcgcgcagtacatcgcgggtggtgccggctatgtccgtgacgatggccgcctcgcgaccggccagggcattcagcaggctggacttgccggcattcggtcgtccggcgatgaccacggtcatgccgtcgcgcagcagggcgccttgggaagcttcgcgctgcactgtggataattctgtgcgtactttttccagaagccccagtacatggccatcggcgaggaagtcgatttcttcctcggggaagtcgatggcggcttcgacatagatgcgcagggaaatcagttgctcggtcaatgcatgtacccggcgtgagaattcgccctgcagggaacgtaatgcattgcgcgcggcctgctccgagctggcctcgatcagatcggcgatggcttcggcctgggccaggtcgagcttgtcgttgaggaacgcgcgctcgctgaactcgcccggtcgcgcctggcgggcgcccagttccagacaacgctgcaccagcaggtcgagtaccacggggccgccgtgcccctgcagttcgagtacgtcttcgccggtgaacgagttcgggccggggaaatacagtgacaggccttcgtcgatcacctgcccaccggcatcgaggaacggtccgtaatgcgcatgccgggctttcagctggcgtccgctcacggccacggccatctgtccggcgagaggtccggagacgcggacgattcccacgccgccgcggccctgggcggtagcgatcgcgacgatggtttcggtggcggcttgcatgtggatatctccggatagcaagacgcccctcgaggggggcgtcttgttgtggacagttttcgcgatagacgtcaggcggtcttcgcggctgcctcgatcttgcgggtaatgtaccactgctgtgcgatcgacaggcagttgttgactacccagtacagcaccagaccggctgggaaccagaggaagaagaaggtgaagatgatcggcatcagtttcatcaccttggcctgcatcgggtccggcggggtcgggttgagcatctgctggatcagcatggtgccgcccatgacgatcggcaggatgaagaacggatccttaaccgacaggtcggtgatccagccgagccacggcgcctggcgcatttccacgctttccaggagtacccagtagagggagaggaagaccggcatctggaccaggatcggcaggcagccgcccagcggattgatcttctccttcttgtacagctccatcatcgcctgggacatcttctgccgatcgtcgccgtgctgttccttgatcgcctgcatcttcggcgacaccgcgcgcatgcgcgccatcgaacggtagctggcggcggacaacgggaagaaggccagcttgatcaggacggtcagggcgatgatcgaccagccccagttgccgatcaggctgtggatatgttgcagcagccagaagatcggctgggcgatgaaccaaaggaaaccgtagtcgacggtcagttccaggcccggggagagttccttcaggtgcttctggagtttcgggccggcatacagggtcaggtcggtttccaccttgctacccgccggaacgctcagggtcgggccggtgaaaccgacgatgtagttgccctggccgtccttgcgggtcatgacctggtgctgctcgcccttggtcggaacccaggcggtcacgaagtagtgttgcagccaggcgacccagccaccctgcacggactccttgaactgttccttgtccatgtccttggtggagatcttcttgtacggcgaatccggggtccagaccgcggcgccgaggtaggtggacaccccggtggcggtggtcgaggacgggtcggcgctgccgtcgcgcttgagctgggcgaacaggttgccgctccaggtcttgccgctctggttgtcgatcaggtagctgacgccgacctgataggcgttttcattgatgcactcgatcttcttctgagccttttccttgtccgagcaatcggctttcaggccacggtggaaggtgaagcgcttgatgtagttgacaccgtcgtggctgaagctcaggtccacgaccagttcgttctggccgtcggccaactggtagctgctctgcgcactgtggaacagcgggcggccggcgctgctggcgtccgggccgtcggcaccggtgaggccgctctgcgccaggtaggtacgttcgcgaccgttgtcgaacagcgggaacggcacgtccggacggtccaggcggcgcggatactgcaacaggccgagctggacgatatcgccgccacggggatcgatggccaggtcgaggacgtcggtcttcacctggatcagcttgtcgctgaccgcaaccggcttgtcggcggcttcgctgccggccgcgctgctctgggcagtgggaacgtcactgctggtgcccgaggcggacggagtgtccggcaggccttgcgtggtgttcatcgaagcgctggcggcaggcagctcaggctgaccgtaatccttgttccactggagaaccagcaggtaggacacgactgcaagggcgacgatgagaatcgagcgttgaatgtccatggttactcggccatcgagaaagggcggtgcttgaaggaaactgacagtagcagatcgcggctacgggattgccagtgatggagccgagtggaggaaaccgcactcgggcgaccattgcgtcgcgggccatgctgcgcgatagcctcgtacgctagggaagtacaacttggctgggaacgacggtgccgggtcatcgaaggggggatgacactacagggatcgggatgcgcgggcatcgacctatgcatgagtaccgtcggccacgccaggggcgtcagcagggctttccgtgcgaggtcgattgcgcaacaggcgtttccagagcttgccgaactgctggtgcagctccggattttccagttcgcccaggcctttgcgcgcgatcaccacgatatcccagccagccagggtttcctggttatggcggaacgattcgcggatcaggcgtttgaggcgattgcgctggacggcgagcttgacgttcttcttgccgatcaccaggcccaggcgggggtgatcgagaccgttctcgcgcgccagcagcaggacgtgcttgccggggaccttgccggtcggagagtcgaagactgcgctgaattgccgggctgtcagtagacgcttgtcccggtcgaagtcccgactcaccacccgtaccggataaatcagacggtcagacgcttacggcctttggcgcgacgacgcgacagaacctgacggccgttcttggtggccatacgggcgcggaaaccgtggacgcgagcgcgcttgagggtgctgggttggaaagtacgtttcatgattcggtacctgggttgacgacttgaggtcgcagtgaccccgtttaaagagaccggcgattctagtgaaatcgaacgggcaggtcaatttccaaccagcgatgacgtaatagatagatacaaggaagtcatttttcttttaaaggatagaaacggttaatgctcttgggacggcgcttttctgtgcataactcgacgaagcccagcaactgcgtgtttctccggcaggcaaaaggttgtcgagaaccggtgtcgaggctgtttccttcctgagcgaagcctggggatgaacgagatggttatccacagcggttttttccacacggctgtgcgcagggatgtcccccttcaaagcaagggttatccacaaagtccaggacgaccgtccgtcggcctgcctgcttttattaaggtcttgatttgcttggggcctcagcgcatcggcatgtggataagtccggcccgtccggctacaataggcgcttatttcgttgtgccgcctttccaatctttgggggatatcc
